United States Patent Application Publication US 2022/0098646 A1 - sequence listing, part 3

SEQ ID NO: 1 - DNA, 5488304 bp, Klebsiella pneumoniae (residues 3,658,871-5,488,304 of 5,488,304)
  misc_feature: Chromosome DNA
cccagcaccggcgtaatcgcccccgggatcagcagaacaaacagcccgccgtgcggcgccatcagtttcgcgccgaccgccatggagatagcgccggttaccgcgccgccgacgatacagcacggcagaacgcgcatcgggtcacgggcggcaaaaggaatcgccccttccgagataaagcacaggccaagaaccagcgcggctttgcccccttcccgctgccctttgtcgaacttattgcgcgctaccagcgtcgcgatacccatcgccagcggtggcaccataccggccgccatgatcgccgccatcggcgcataagtctgggtactcagcaggccaacgccaaaggcataggccgctttgtttaccggcccgcccatatcggtacacatcatcgcgccgaggatcgcgcccagcagaaccgcgttggcggtgcccatggtttgcagccaatgggtcagccaggcgaggataccggctaccggtttaccgatcagatagatcattgccaaacccacgatcagactggagaccagcggaatgatcaggattggcttcagggcttccatactctgcggcagtttcagcttcgtgctgatggctttcgccacataaccggcaaggaaaccagcgatgatcccgccgataaagccggagccgccgctaaccgccagcataccgccgataaggcccggggtcagacccggacggtcggcaatggagaaggcgataaagcctgccagtaccggcaccatcagcgcgaaggccgagccgccgccgatctgcatcagcgccgccgccagggtgtctttcacttcaaacgctttgatcccgaaggcaaaggagagcgcgatacacaggcccccggccactaccatcggcagcatataggagacgccggtcagcaggtggcgataggcgcccgccgactcttttttcccttcagcagccgcctgaggtttgccggatggctggtacggtttggcttccgccaccgctttatccagctcctgggcggttttcttcagcgccagaccggtggtggtgcggtacatcggcttgccggcgaatttcgccaggtccacctcgatatcggcagcgacgatcaccagatccgcctcggccacctcttccggggtgatggcattgcccgccccaacggagccgcgggtctccaccttcacccaccagccgcgttttttggcttcggtttcgatggcttctgccgccataaaggtgtgggcgacgccggtcggacaggcggtgaccgcgacaatgcgtttctgcccctgagcggcggccggaacggctaccgccgctggcgcaacgtagggcttagcgtggtctttcgcttctcccaggaacagctccggatgggcgacagcacggttaatatcgcccaggtaaacgtttttaccattcagcgcgctatcggccggcagcgcggttcccagcacgatggccagttcggcgtcattcgggttatcaatcagctcaaggtgcgctttcggcgccgcggcacccagcagggttttcgccatgtaggcgcgcgcctgtccgagtccggcatcaataatcagcagcgttttcattatgcctctcctgctgtcaattaaagggttgtaagtcgacgcgcgccatcatcgcggccaactgggtacggtcggtaattcctacattgctctggctgacggccagggcagcgacggcggtcgccaggcgcagggtatgctcgctggattcacgcatcagcaggccgtaaatcaggccgccgaccatcgaatcgccggcgccaacggtgctgactacttccactgaaggtggtttagcaatccactccccagaggcgttgacccacagcgcgccctcttcgcccagggagatcaccacgtgggcgataccctgctcgcgcagcgcatgggcggcgtcgataacatctttcatctccggcagcttgcggccagcccagatttccagttcgcgacggttcggtttcaccagccacggcgccgcttttagtccggcaaccaacgcttcgcggctgctgtcgaaaatgatgcatgggcactgactgcgcagacgggtcatccagtcggtgaaggcttccgggctaacgccggacggcaggctgccgctgacgcagaccatatcgaactgcccgagccagctcagggagtcgttgacgaagcgttcccagtcgcccggggtgacttcaaagccggagaagttgaaatcggtcacttcgccatctttttccgtcagcttaacgttgatacgggtccggccctgcaccacctggaaacggttggcgatccccagctcactgaacagctgctgaaagccgtcctggttgtctttacccaggaaaccgccgacggtgacgtcaatgcccagatctttcagcactttcgccacattaatgcctttcccggcagcgtgcaggccggtggtgcgcaccaggttcacttcgccgcgttcaatctccggggtgaatcccaccaggtcgtatgccgggtttaacgtaatcgttgctacacgtctgctcatttatgcgccctccccaaggcctgcggcgatcgcttcgccaatcgcatccagcgcttgttgcgcatcctcaccctgcgcggtaaaacgcagacggtgaccttttttcacacccagcgccacaaccttcatcaggctgcgaccgttagccggcttgccggaaccgtcgagattggtgacggtgatgtcgctggaaaattgtttaatggtgttgaccagcatggtgcccggacgggcatgcaggccgtgttcattgcgcaccacgaattcggcgctcagcacatcttcggcaatggcgtcgtcgctggtcagcagcgccagcacggtggcggcgtcggctttcagcaaatgttcagctttcttgtccagcagcagcttgctcagacggttcagcactgcggtcggctgctcgtcggccatcgctaccgtgaccagcagggaaaccggctgctcgtcgcgggtaaaggcgttagccgcgcggctgaccgccacggcgctgcgcaaattgccttccgcactgtcgttcagccagacgccctgaccgaggttcagcggcgtatcgttaatgacgtggctaacgaaggcggcatcgacagcgccaacttctttcagacgcgccgcgttcagcgcctgcaaggtcagcagatcgctggccgcgacgtcgagactgagggtctcgttatccagtttcagcgcttcgctctgcttctctcccatcagcagcgcgcgcagctcttccgcggtggtggcggactgcagctgcgcggcgaccgcgtcatcgctcagcacgtgggtcagctgacgcagcaggccgaggtgttcatctgagctggcggcaatcccgatcgccacataggcggtctgcccttcaccccaggtgacgccctgcgggaactgaaacacctgaacgccggtcttcagcacctggtcacgcgtatccgtcgtgccgtgcgggatcgcgatcccgttgccgaggaaggtcgaggtctgctgctcgcgcgccagcatgccgttcacgtagccatcggccacgttgccggcgctgaccagcgcggcggcgacctgccggatggcctcttctttattaccggcctgctggccgggatgaatatcctgcacagataactggaacatggttctcctctcctgctgaattgaatcgtttcagctaacttgagaaaaaaggcgccatctgacggggaacggattgccgaatgacgctgaaacgtttcaagaattttgtacctttcttgctcaacgcgcaaggtacgtcagcgacttgatcgcagaacttagaggtactgcacacttttgctgaagccttagctatcgaccgcctcgaacgtcagctttttgctgaaccctatattttgaaacgcctttttaattattcgtgccatactactgtttatttttagccagcaggcgtaaactccgcgccgtctcctgaaactacagaaaaccaaacccatggaaaaccgtagcgccgctctcccccgacgcgggttcgatgtcacctcttccgccttcttaatcgtcgcctttctgacgggcattgccggggcgctgcaaaccccgaccctgagcctgtttctgaccaacgaagtgcacgtccgcccggcgatggtcggtttcttttttaccggcagcgcggttattggtattctggtcagtcagttcctcgccggccgctccgaccgtcagggcgatcgcaagcagctgattgtcgtctgctgcctgctgggggtgctggcctgcgtactctttgcctggaaccgcaactatttcattttgctgttcatcggcgtttttctcagcagctttggatcgaccgccaacccgcagatgtttgccctcgcgcgggagcatgccgacaggaccggccgcgaagcggtgatgttcagctccattttacgtgcccaggtctccctggcatgggtgattggtcccccgctggcctacgccctggcgatggggtttggttttaccgcgatgtatctcagcgccgcggcggcgtttatcgtctgcgggatcatggtctggctattcttgcccagcatgcgcaaagcaaagccggtagcgaccggccggctggaagctccgcgcacgcatcgccgcgatgcgctgctgctgttcagcatctgcaccctgatgtggggtactaacagcctgtacatcattaacatgccgctgtttatcattaacgagctgcatctgccggagaagctggcggggctgatgatgggcaccgccgccggactggaaattccgaccatgctgattgccggttactacgcccggcgtttcggcaaacgctttctgatgcgtctttctgcagtggccggggtgctgttttacgtcggcatgctgacggtgcatacgccagcgctgctgctggcgatgcaggtgctgaacgccatctatatcgggatcctcgccgggatcggcatgctctatttccaggacctgatgccggggcaggcgggcgcggccaccaccctctataccaatactacccgcgtcggctggatcattgccggctcactggcgggggtagtggcggagatctggagctatcacgcggtgttctggattgcgctggcgatgggcgttgtcactcaggcctgcctgtggcggataagagacgtgtaagcacattgcccggccagagccgggcaatgcagattaatgatcatgatagagtcaatgcagccagctcggcctgcagatgtttcagccatgcgcaggcatccgtgtcgtcagtgctatagtgcagttgccctttataattaacttattgatcttaatataatttttgatttccgcattaataactgaacaatatgacaccagagtaatatcgacagcaccattatttggtccggggctcaaaaaaatgccgggagataaaacaaatgtatttaaaatacaataagttattcgatgttttggaggcgacccatattcaacgccggatcgccctttaagcagttatactgaaatattagcgttcaggaatcaaaatttggtgaatacttcacaggagacattgaccctttctttctgaggtcatcagggatcttcttaccaagatagagctgtgtaatttcaggagatgccgcgcgacctcgaaaaccaaagcgtgaactttgagtagcttcaaactcatcatcttcatcccattggcgcatttcaggaaagttgtcacgggtagattttaaccactcatcagcaacatatacccctctgacaattccttttactgtagccaggataacttcagctttgcttgcacgttcgaggcttacacgccaactgaagcgtactgcgtcatagagatcaacatcctttgaacttctgttaacagatatcatcagcgctttgtgcttaaactccactgtctcaggctggtacgttgcaattaattctttaatatgtgcagcgccatactcgttactgccagcaccgttcatgatattggtcaaacctgggtaggcatcgattagagcagcctccacctcataagcagtcttttcatcggcaataccatgccgatggattacatggatgacctccagaccagctaatctaatctcacgaagttgcttgagtttattactgagcagttcatcatcatcagcggctgccacttcgccgcgcatgtgagcaaaaacgcgattgccttttcccttacccacgtaaaaagtgcttccatctcgtggatcaatcagtcgatatacataccaaccgagatgttcgataactcccggagggaactcattaatatccatatcacaacacctatcacttgattactggtgtatacgttatactttcagctgtagattgacaatttgtaagcaatacaaaaattcacactgcctactgctgtcacgctcagataacattatcctcatcaagtcgatatttatcccccttcctcccgagcgcgagtctgcagaggatgggatattgatggtacaaatatgtttagtgactatattgcagagaaaacaggctttcgtgttcaatttgatattgagcagttgaagccagacctcaatgtcgatgccactgatagatttcaacaacaaaacctggaagacgtgttggtagattaaatggctgcgtgatagctatcctctcagaggagccacctatcctgttgatataaaacaaaataaacaccaccataggttatatacttataagcaatgttctacaaatacctatggtgccgtgctggactccaagtgaagcaggtaagttatagcggcgtcacgatccgtcgaacacatatctggcgaaggttgaagattgccgcacacttttggtcgcagttccgaaccgaaaatgttacataggttgtcattagataattgaacacacctgacattagccggcttgccctgcggcatgccggggatcggcgatgatatagagggggcgatgcaacatgcgccacaatcagtacgacattccacaacccgactcccaaacgctcattttgcgccacagcctaaacgttttgccagaagatagcaaaactcgcgaaatccgcttgcctgaacgcccgggcgcgagtagttttacgcgatatttttgactcgttaagtgacaggattactgcaatgccaagagcgaatgaaattaaaaaaggtatggtgctgaattacaacggcaagctgctgattgtgaaaaatattgatattcagtcacccagcgcccgcggtgctgcgacactgtataaaatgcgcttctccgatgtgcgcaccggcctgaaagtagaagagcgcttcaaaggcgacgatatcgtcgataccgtcaccctgacccgccgtttcgtcgacttctcctacgtcgatggcaacgaatacgtgttcatggataaagaagactataccccttacacctttaccaaagagcagattgaagaagagctgcagtttattccggaaggtgggatgccggacatgcaggtgctgacctgggacggccagctgctggcgctggagctgccgcagaccgttgacctggaaattatcgaaaccgcgccgggtattaaaggtgcgtccgccagctcccgcaccaagccagccaccatgagcaccggcctggtgattcaggtgccggaatacctgaccaccggtgagaaaatccgcattcatatcgaagagtgccgctatatgggccgcgcggattaatcatcggtaacgccccgacagtaaaaaaggacagcgctggctgtcctttttattatccccattgccgcgattacagcagttcagggtatttggtcattttcagcgccagctcgacgccgcgcacttccgccatccccttgagacggccaatcgccgaatagcctgggttggttttcttgcgcagatcgtcgagcatctgatgaccatgatccggacgaaatgggatcgggcgcagatcgccggcctgtttacgccgctgctcttcacgcaggatagcatccaccaccgccaccatattgacgtcgccgctaaggtgcgccgcctcgtggaaggttttcgggtttgcttcacggcaggtagagcgcagatgggtaaaatggatgcgatcgccaaaggtctccaccatcttcaccagatcgttatcggcgcgaacgccatacgatccggtacacatggtgaagccattattaatgctgtccaccgtctccttcagccactgcatatcttcgatggtcgacacgatacgcggcaggccaaggatcggccgcggcggatcgtccggatgcacagccaagcggatccctacctcttcgcataccggcacgatggcgcgcaggaaataggccatattttcacgcagctgcgctttatcaatgtggtcatactccgccagacgcgcgcggaactggtcaagggtgtagccctcttccgctcccggcaggccggcgatgatattgcgggtcagtttatcgatatctgcttcgctcatcgccttgaaatagacctcagcctgacgctgctcttcttcactgtaatccgcttccgctcccgggcgtttaaggatatgcagctcaaaggcggcgaaagcgatctgatcgaaacgcagcgcccgggagccgtccggcagctcatattccagatcggtgcgcgtccagtcgaggatcggcataaagttgtagcacacggtatcgatgccgcaggccgcgaggttgcggatgctctgctgatagttggcaatccaggtcgcatactgcccgctgtgggttttaatatcctcgtggacgggaatgctttcgacgaccgaccaggtcaacccttttgccgctaacagcgcctgacgcgctttaatctcgtcgaccggccatacctgaccgtttgcaatatggtgcagcgcagtgacgacgccggtcgcccccgcctgccgtacatcatcaagcgataccggatcgttcggcccataccaccgccaggtttgctccatcgctatgtcctcacaaaagttgttataccaataatggcgacactcatgacgactaccatacatgtttctcacctggctgcaaacagtgctggcctattgattgatccagctcacagtcagcggataatttcggcttaccaatttaacttcctgtcatataactttagactggcattgttaataagcagttaaacaggtgtgggaagaatgacaacaattgcaaccgctacgctaccgaagaacgtgcaataccctcaatacgatcgcagccaactccgctcgcgtattgtccatttcggctttggcgcgtttcaccgcgcgcaccaggcgctgctcaccgatcgcgtgctgaataacgtcggcggcgactgggggatctgtgaaatcagtctgttcagcggcgacacgctgatgagccaacttcgcgaacaggaccatctgtttaccgtgctggaaaaaggcgccgacggcaaccagcccattgtgatcggcgcggtgcacgaatgtctgaacgccaggctcgattcgctggcggcgattatcgaaaaattttgcgagccgcaggtagcgattgtctcgctgaccattacggaaaaaggctactgcatcgatccggcgaccgggaaactggatccgacgcatccgcgcattattcacgatctggagaatccgacgctgccgcagtcagctcccggtattttagttgaagcgctagcccgccgccgggaacgaggccttccgccctttaccgtgctctcctgcgataatatccccgacaacggtcacgtggtaaaaaatgccgtcctcggcatggcggaaaaacgcagcccggcgctggcggactggatcgccgacaacgtcagcttcccgggcaccatggtggatcgtattgttcctgcggccacaccggagtcgctggcggaaatcgccgccgtgctggggatcgacgatccctgcgccatcagttgcgaacccttcattcagtgggtggtcgaagatcacttcgtcgccgggcgacccgcctgggagacggcgggcgtgcagatgaccgatgacgtgttgccctgggagcaaatgaagctgcggatgctcaacggcagccactctttcctcgcctggcttggctatctggcagggcatgcgcacattagcgactgcatgcgggatgacgtcttccgccgcgccgcccgccagctgatgcttgacgaacaggctccgacgctgaccattaccggcgttgatctgctggcctatgccgacagtctcatcgcccgcttcagcaatccggcgctcaaacaccgcacctggcaaatcgccatggacggtagccagaagctgccccagcgcatgctcgatggcatccgcgtacatctggcgcgcgacagccgttggccgctgctggctctcggcgtggccggctggatgcgctacgtcagcggcacggacgacgccggtcagacgatcgacgtgcgcgatccgctggtcgacaagatccggcagcgggtggcccagagcgatgagcagcagcgcgtcgacgccctgctggggctggaggaaatatttggccgcgacctgccgcacaacgcccagtttgtcgccgggatccgcgccgcctggcaacagctggcgacgcacggcgcccgcgaggccgtcgcccacgcgctgaattcttaacaatatttgcgcttatgcggacagaattctcttctgtccgcctcaggacttctcttttcccccttttttcgtcaggataggcgtaactgttacaacattacatttatcctggagaaaaagagtgaccagaaccaatttgatcaccggctttctcggcagcggtaagacgacctcgattcttcatctgctggcgcagaagcctgcggatgaaaaatgggccgtactggttaacgagtttggcgaagtcgggatagacggcgcgctgctggccgatagcggcgccctgctcaaagagatccccggcggctgcatgtgctgcgtcaatggcctgccgatgcaggttgggctgaacaccctgctgcgccagggcaaacccgatcgcctgctgatcgaacccaccggtttgggccacccaaagcagatcctcgatatcctcaccgcggcggtgtatgagccctggatcgatctgcgcgccacgctgtgcatcctcgatccccgccagctgctggatgaaagagccgtcagcaacgacaacttccgcgatcagctggccgcggcggacatcattgtggctaataaaagtgatcgggaaaccgccgaaagcgcccgggcgctggccgactggtggcagcgctggggcggcgagcgtcgcaaggtgtcggcaatccagggcaatatcgatctggccctgctcgatgagccacgacggaacaccgccccgctgccggcgagcgcggagcacgcccaccgccatcccccctcttccggcctcgccgcgctcagcctggcggaacaccagcgctggcgccgacatctcaacaatggccagggctatcagggctgcggctggatcttcgacgcggagacggtttttgacaccatcggcctgctcgaatgggccaggctggcgccagtggggcgcgttaaaggcgtgatgcgcattgccgagggggcggtacgaatcaaccgtcagggggaggatctccatatcgagaccctcagcgtcgctccgcccgatagtcggatcgagcttatttccgcgaatgaagccgactggaacgcactccagacctcgttgttgaggcttcgtttaagttaaggcggctaaggttgccgccgactgtcacaaaatcgcaatggctatgatgaaaaaccgaattcctttaatcctgctgcttaacatcgcgggtgtagcgctattttgctcctggtatctgccagccaaccatggcgcgtggttgccggtcgactccgcgatcttccatttctttaaccatggcgtcagcgtcagccatgcttatgcctggctgctggcgatcatcaacaatcgcgccttcgacgcctgttcgctgctggcgatgggctgcctgatgctgagctattggctaaaggcgccgactgcaggccgtcgtcagatcgccatcatgggcctggtgatgctgctggcggcggtgatcatcaaccagctcgcacaacacctgatgccggtacagcgcgccagcccgtcgctgttttttagcgatattacccgcgtcagcgacgtcgttaacttccccactaaggatgcgtcgaaggacagcttccctggcgatcatgggatgatgctgctgatcttcgcgagctttatgtggcgctattttggccgtcgcgcgctgggcgtcgcgctgattatctttgtggtctttgctttcccgcgggtaatgattggcgcccactggtttagcgatattgccgtcggctccctgaccgccgtgctgatcggcgcgccctgggtattgatgaccccgctgagcgataaattgatcgcctttttcgatcgctacttacccagcagaatatcggccaaataatgtctccggcagccgccaaagtcattaactataaggggaccttttgggtccctttttacattttccctttttttcaacatgacgttcatcttcttgtcacattaatcccgtgacaaatgaaggaattgtctgttttttgcccgatattgccgtaattttggcctttcccgatgattcactttttgtcaccaaaatacttataagaaatcgcgcaaaaccgctcgccatgcggcgtttgatagggtaatctcgttctcgttttgccttttccgcagcattaattcagggcatgaataaaattgtgcgtgactgcacaaatttaagcttaaggaattgtctcattgcggatgggtatttaggctctaacacgtttggcattttttataacgacattgtcgttaaggacaacaagggaaaataaacagcatggtcaaatctcagccgattttgagatatatcttgcgggtagcccccgcgattgcagtagcggttctgctttccgcgtgtagttcaacaagtaccgccaggaatatgcattctgagacgcatgctgtgggtagtggcgatttatcatcactgcaagcctctcaggatgaatttgaaacgatggtccgtaacctggacgtaaagtcccgtttaatggatcagtatgccagctggaaaggcgtgcgttaccgcctcggcggcagcacccgcaagggtatcgactgctcagcgtttgtgcagcgcaccttccgcgaacaatttggtctggaactgccgcgttcaacttctgaacagcaggaaaccggaaaatcgatttcccgtgcccaactgcgtacaggcgatctggttctgtttcgcgccggctctaccggccgccatgtcgggatctacctcggcaacaaccagtttgttcacgcctccaccagcagcggggtgactatctccagcatggatgagccgtactggaaaaagcgctacaatgaagcgcgtcgagtcctgagccgctcgtaaactgtcctccaccgccgccggttatcccttggctggctgcgggataaaaaacactgccccaggcagtgtttttttttgccacctggttctcaacgtcgcaaaataagctatgtcttttaagtgggaatgagaaaaacgacgaccgacactccgttgatgcgcttcaataatacggaaagaatctggctatgcttactcgctacttttcgccccagcgtaaaacctggttaaccagcctgagcgtggggatcatcgtcgcgctgttggccgggagcattcagtttatggtgatctaccataaccgggccgagcgtttcgacgccattatcaacaatgttaatacctatctgaaaagctattttcacgacctgcgccagaccattgacggcctgcagccgctggtggaccagccctgcgagaatattgactccgggcttacctcccacgccgcgttcagccccaacgtccgcgctttcctgctggtcaaaaacggcatcgccttttgctcatcggctacgggagccatgaatacgcccctcagccagctgatcccggccatcgatatcagcaaacccgttgctatggcgattttaccaggcacgccgatgatgccgaagagcgcggcgctggcgctgtgggtaggtaaacccggcgatcaaaacagcggcattttcgtgtcgattaacgctaatctcacaccgtatatcctctattccgcgcggcaaaacgatttcagcggcattgcgctggccatcgatcacaccgctatctccaccttcagtaatcggctggtggatccgcaaacgctgcataacgcgccgatccgccaggcacagatcgagggcttaccgctgaaggtctatctgtatgccaacagctggctggcggaaaatacgcagtttgctctgctgctcggggtcgtctgcggcctgctggcggggctgctctgctattacgtgctgacgatcaaatcggatccgcgaaaatccattctgctggggatcaaaaataaccagttctacatcgtttatcagccggtggttaatgctcagactctacgtatcagcggcgtggaggtcctaatgcgctggcgccatccggtggttggtgaaattccgcccgacgtttttattaacctggccgaaacccagcagatgatcgtgccgctaacccatcacctgctcgcgctgatcgccagcgacgctgcggtgttgaagcgtattctgccgcgcggcgtgaagctggggctgaatatttcccctgcccatctgcaggccgacagcttccgcgacgatatgctgcgcttcgccgccgcactgccagccgaccactttcacgtggtgctggaggtaaccgagcgggcgatgattgataaagaaaaatcgatggctaacttcgcctggctccaccgccagggattcgaaatcgcgattgatgatttcggcaccgggcatagcgcgctgatctatctcgaacgctataacttcgattatctgaagatcgatcgcggttttgtgcaggcgattggtactgaaacagtaacctcgccggtgctggatgcggtactgaccctcagccgccggctgaaattaatgaccgtcgccgaaggggtggagacccaggaacaggcggagtggcttcgcggccagggcgttcatttcctgcaggggtactggatcagccgaccgctgtcgctggccgggctggtggctgcgcacgatgaacccgcgaactatttcacaacgcgctaagtctcacttatgatgcgggaacggatgtcggccatgggggccggccatgacaaggtattctgccgcctatgtatgcgcgcctctttctgattctgctggctctgtttagcctggacgctaaggcgcaaaccattcaggaaagcgtagccttcgcgattatcggcgaaccgaaatacgccgccggtttcagtcattttgattacgtcaatcccagggcgccgaaaggcggcaccctcaccctggcggcgatcggcacctttgataacttcaaccgttatgcgctgcgtggcaaccccgcggtacgcacggaggcgctctacgataccctgttcaccacctcggatgatgagcccggcagctactacccgctgattgccgagcgggcgcgctatgccgaggactattcctggatggagatcgcgctcaacccgcgcgcccgcttccatgacggtacgccgatcaccgcccgcgatgtggcgtttaccttcaacaagtttatgaccgaaggggtgccgcagtttcgcctgttttataaaggcaccaccgtgaaggccatcgcgccgttgaccgtgcgtattgacctcggccagcccggcaaagagaacatgctgagtctgctgagcctgccggttatgcccgaggcgttctggcgccagcacaaactcagcgacccgctgtcgaagccgccgctggccagcgggccataccgcatcagcgcctggcgaatggggcaatatattacctattcccgcgtcgccgactactgggcggccgacctgccggtcaaccgcggtcgctggaatttcgatacgctgcgctatgactattatctcgacgacaatgtcgctttcgaagcctttaaagcgggagccgtcgatcgccgggaagagaccgtcgccaaaaactgggctacccgctacgtcggtcgcaacttcagccgcggctacatcattaaagatgagcataccaatacctcggcgcaggatacccagtggctggcgttcaatattcagcgcccgatttttgccgatcgccgggtgcggcaggccattaccctggcgttcgatttcgaatggatgaacaaggcgctgttttacagcgcctatcagcgcgccaacagctatttccagaacaccgaatatgccgcccgcagcctgcccgacgcagccgagctggccctgctgacgccgatgaaaaaagaactgcccccggagctcttcagccaggtttaccagccgccggtctcccgcggcgatggcttcgaccgcgccaacttactcaaagccgacgccctgctcaatgcggcgggctggacggtgaagaaccagcgccgggtcaacgccgccaccggcaagccgctgcgctttgagctactgctgccggccgggggcaatgaccgctgggtgctgccgtttcagcacaacctgcagcgtctggggatcgtcatggatattcgtcaggttgataattcgcagtacagcaaccgccgccgcagccgggattacgacatgatgccaagcctgtggcgcgccatgccctggccggggaccgacctgcaaatctcctgggcgtccgactatattcactccagctacaacgcgccgggggtgcaaagcccggtagtggataagctgattgcgcagatcctgcagtggcagggcaataagcagaaactgatccctctcggtcgggcgctggatcgtgtgctgacctggaataactacatgttgccgatgtggtatatggcgcaggaccgcaccgcgtggtggaataagttctctttccccgcgacccgccccatctattcgtccggcctcgatacctggtggtacgacgtgaacaaagcggccaccctccccgcggacagacgctaaggacatcccatgggcagctacctgatccgccgtttgctgttagtcatccccaccctgtgggccattatcaccattaacttttttattgtccagatcgcgcctggcggcccggtcgatcaggccatcgccgccatcgagtttaatcagcgcggcgggatgccgggggctggcgacggcggaatgggcgccagccatgcccgcaccggcgcaggcaatatcagcgagggtcactatcgcggcgggcgcggcctcgacccggaagtcatcgccgagatcacccaccgctacggcttcgataaaccgctgcacgaacgctatctgaagatgctgggcgattatctgcgctttgatttcggcgacagcctgtttcgcagcgcctccgtgctgcagctgattaaagacagcctgccggtctcggtgagcctcgggctgtggagcacgctgattatctatctggtctccattccgctgggcatccgcaaagcggtcagcaacggcagccgctttgatatctggagcagtacactgattatcattggctatgcgatccctgcctttctgttcgccatcctgctgatcgtgatttttgccggcggcagctatttcgacctcttcccgctgcgcggtctggtctcgccaaatttcgacaccctcccctggtatcagaagatcctcgactacctgtggcacatcaccctgccggtgctggcgacggtaattggcggctttgccgcgctgactatgctgaccaaaaacagcttcctcgacgagatccgcaaacagtatgtggtcaccgcccgcgccaaaggcgttggtgagaaacagatcctctggggacacgtgttccgtaacgccatgctgctggtgatcgccggcttcccggccacctttatcagtatgttctttaccggctcgttgctgatcgaagtgatgttctcgctaaacggcctgggtctgctgggctatgaagcgacggtctcccgcgactatccggtgatgtttggcacgctctatattttcactctgattggcctgctgctgaatatcgtcagcgatatcagctatacgctggtcgacccgcgcattgattttgagggccgctaatgtctttcttcagtcccgttaatcaggcccgctgggcgcgctttcgccacaaccgtcgcggctactggtcgctgtggctgtttttaattctcttcctatgcagcctgggcgccgagctgctggccaacgaccgcccgctgctggtgcagtaccggggccagctgtacgtcccggtgttaaaaaactacactgagcaaaccttcggcggcgcgttcgccaccgccgccgactatcaggatccctggctgcagcaccagctggcgactcacggctgggcgctatggccgccagtgcgcttcggcgcgacgacaattaattttgccagcacggttccctttccatcgccgccctcggccagcaactggctcggcaccgacgccaacggcggcgatgtgctggcgcggatcctctatgggacacgcatctcggtgctcttcggtctgctgctgacgctgttctccagcgtgctgggggtgctggccggggcgatacagggttactacggcggtaaaatcgacctgtggggacagcgctttatcgaagtctggtccggcatgccaacgctgttcctgatcatcctgctctccagcgtcgtgcagccgggcttctggtggctgctggcaatcaccgttctctttggctggatgacgctggtgggcgtggtgcgcgcggaatttctccgcacccgcaactacgactatgttcgggcggcgcaggcgttaggggttagcgaccggcagatcatcctgcggcatatgttgcccaacgcgatggtggcgaccctcaccttcctgccctttatcctgtgcagctccattaccaccctgacgtcgctggattttctcggcttcggcctgccgctcggctcgccctccctcggcgagctgctgctgcagggcaaaaacaacctgcaggcgccctggctgggcattgccgcgtttctctccgtcgccgtgctgctgacgctactgatttttatcggtgaagcggttcgcgacgcctttgacccgagtaaggcggtgtaatatgacccacccgctattagctatcgacaatctctctattgcctttcgccagcagggcgagacgcagaccgtggtgcataatctgtcgctcgaggtggcggtcggcgaaacgctggccctggtgggcgaatccggctccggtaagagcatctccgccctgtcggtgctgcggctgctccctaccccgccggccagctaccccagcggtgacatccgttttcatggccagtcgctgctgcatgcggatgaggcgaccctgcgcggcgtgcgcggcaaccggatcgcgatgatctttcaggagccgatggtatcgctcaaccccctgcataccctggaaaaacagctctacgaagtgctgtcattacaccggggaatgcgcaaacaggcggcgcgcggggagatcctcgactgcctggagcgcgtcgggatccgtcaggcgccgcggcggctggcggactatccgcatcagctctccggcggcgagcgccagcgggtgatgatcgccatggcgttgctgactcgcccggagctgctgatcgctgacgagccgactaccgccctggacgtatcggtgcaggcgcaaattctgcaactgctgcgcgagctgaagcaggagctgaacatggggctgctgtttatcactcataacctgagcatcgtccgccagctggctgaccgggtggcggtaatgcagaacggccgctgcgtggaacacaatgactgtcgggcgctgttcagcgcgccagcgcatccctacacccaacgcctgctggatagcgagccggacggggagccggtgccgctggccgccgatgccccggtgctgctgcaggcggacgatttaaaggtggcgtttcccgttcgcaaagggatcctgcgtcgggtggtcgatcatcatcgggtggtcaacagcctcagctttcagctgcgcgccggcgagacgctgggcctggtgggggaatcgggttccggtaaaagcaccaccggcctggccctgctgcgcctgatcccgtccgggggcaagataaccttcgccggccagccgattcaggggcgtaaccgccgacagctgctaccgctgcgccgacagatgcaggtggtttttcaggatccgaactcgtcgctcaatccgcgcctcacggcgcagcagatcattgaggaaggcttgcgcgtccaccagccgacgctgacggcggccgaacgcgaacaggcggtgatccttgccatgcaggaggtcggcctcgacccgtccagccgccagcgctatccggcggcgttctccggtggccagcgacagcgtatcgccatcgccagagcgttgatcgtcaaaccgcagctgatcgtcctcgatgaaccgacctcatcgctggacaaaaccgttcaggcgcagatcctgaacctgctgaaagccttacagcgaaagcatcagctggcctatatttttatcagccatgatttaggcgtggtgcgggcgctatgtcaccaggtgatggtgctgcgtcagggagaggtggtcgaacagggcgagtgcaagtccgtcttcagcgcaccccggcatgagtatacccgccagctgctggcgctaagctgacggtcagaaagggttattgccggagaagggctcggcgatggccacgccaaagtttttcagacgacaggtggcggcaaactcatcctgcaggttaacgaacaggcagggttcaccttcgcactccagcacggaacagtcgacttcgatgtcgcttaacgcctgactgagcttatgcatcaccggccaggctttctcaccgtccgggctcagcaatttaagggcaacgagactgttctcgttctgcgcgccgttttgcggaatcggttcaactctggaacccgcaaaaccggccagccagcgatagctctgcggcagacggtgtacgatagagagttgttgtgtattcacttggtttccccggaagcaaaaggcttcacaataaatttacatcaatattaacacactgttgacaaatagtcctgccttgaggcagaaaacgtttacagcggcggcggaccagggttaagcgcttataatccagcgctttattttttatacccggcgagccgattggcgctatatgtacccgtttctgtgatccaaaacaacttttttatcgcaacaatgcgactttttacactaattgattttacataaaggaaacaaatcgcagaaccctgaagcccattgcggttgacatgcatcaagaaaggggcgatttcgcccctgaaaatgtgacctagcgtgcgatttttcgccgccgggatgcgtaaagcgagaagaaaatagagcaggttgcgcagaaggcaatagagatcagcatcggccaggcggtggtaaacgtcgccatcgacagcagcgcgccgataatcgccccgataccgaaacggaaagtccccgccagcgacgaagcagtgcccgccatatgcggaaactcatcgaggatcaccgccatggcgttagacgacaccatggatacgcagccgacaaaggccgctacgccgatcaccagtgaccagaagccgacatccagcagcgcgcagaccaccatccacaccgccatggcaaactggatccacagcccggcgcggaacatacgcaacgcccctacccgccgcacaaaccggctgttgaacatggtcatcagaaacagaaaaacgatgttcagcgcaaaatagtagccaaagtgctgaggcgcaacgtggtttatattgatgtagacaaagggaccggcgctaaggaaagagaacatgcccgcgaagctaaagccgctcgccagcatatagctcagtacccgcttgtggcggaacagcgtggcaaagttacccagcgtggtgcgcagatggaacggctgacgcctttcagccggcagcgtttcgcggataaacaggccgatcatcagcgaggccagcagggccaccagggcgaggatccaaaagatggcatgccagctgaaccagaccaacaccgccccgccgaccatcggcgccaccagcggcgcaatggtcgtgaccagcatgacaaacgacatcatgcgcgaaaactcatctttcggatagatgtcgcgcatcagggcgttaatcaccacgctggccgccgcggctgccagaccgtggaagaaacgcatgacaatcagcatatcgacggtttgcgacagggcgcaggctaccgccgccgccgcgaagaccagcgtcccgccgaggatcaccggcttgcggccaaggctgtccgccatcgggccgtacagcagctgacccagcgcaaagccgaggatataggtgctgagcgtcatctgcgcgctgccgtccgggacgttatactgggcggcaatcaccggcagggccggaagatacatatcaatagacagcggcatcagcatggccagcaggccaaggataaacacaatccccagtgaagaattctgcttcagcgtcacgttttactccgtggctgcggggcgcccacgctggcgatttccgcttccgtcagcggacgatattcacccggcgccagcgattcatccagcaggatgtcgccgatgcgttcccgatgcaggccaaccacgtggttgcccacggcggcgaacatgcgtttcacctgatggtagcggccttcgctgatggtgaggcgcacttcggtcggagtgataacttccagcaacgccggtttggtgagatctttttcgttatgcagctggacgcctttggcgaacagctccgcggtcccttccgccagcgggctttccagcgccaccagataggttttttcacagtggtggcgcggcgaggtaatgcgatgcgaccactggccgtcatcggtcatcagcaccagcccggtggtgtcgatatccagccgtccggcggcgtgcagcttatgcgccaccggctcgtcgaggaaataaaggatagtcggatgatcgggatcgtcggtggaacagacgtacccttgcggcttgttgagcataaagtaacgcgggccattctgctgggtcagcgtatttccgtcatactccacctcgtgctccggctggagcttaaaagaggcatctttcacaatgtcgccgtccacggtaacgcggctgccgcgaatttcacgcccggcaatagcccggctgacgccgagctgctgagcgataaacttatcaagtcgcatgagatttttttagcctgtcatagtgctggagcgggcaaatcgcccgaaaaagaagaatttcaccggctagtataacgggctcttaacaccactcaagggaaaagattcatggcatactattcgccagttaattagccccgtgaattcatgacttttacattacgtccttaccaacaagaagccgtcgatgccaccctcgcctggttccgtcgccataccgagccggcggcgattgtcctgcccaccggcgcgggcaaaagtctggtgatcgccgagcttgccaggctggcgcgcggccgcgtgctggtgctggcccatgtcaaagagctggtggcgcagaaccatgccaaatactgcgcccttggcctcgaggcggatatcttcgccgccggtctgcagcgaaaagagagccacggcaaagtggtgttcggcagcgtgcagtcggtggcacgcaatctcgaccagtttcgcagcgaattttcgctactcatcgtcgatgaatgccaccgcatcagcgatgatgacgacagccaatatcagcagatcatcggtcacctgcggcaggtcaatccgcagatccggctgctcggcctgacggccacgccgttccgccttggcaagggctggatctatcagttccattatcatgggatggtgcgcggcgatgaaaaggccctgttccgcgactgcatctatgagctaccgctgcgctatatgattaaacacggctatctgacgccgccggagcgcctcgatatgccggtggtgcagtacgatttcagtcgcctgcaggcgcaaagcaacggcctgttcagcgaagccgatcttaaccatgagctgaaaaaacaacagcgtatcacgccgcatattgtcagccagatcgtggagttcgccgaaaaccgcaaaggggtgatgatctttgccgccaccgtggaacacgcccgggaagtgaccggcctgctgccggtaggccaggcggcgctgatcaccggcgaaacgcctgggccggagcgggatcgcatcatcgaggcctttaaagcgcaggcgtatcgctatctggtgaacgtcgcggtgctgaccaccggcttcgacgccccgcacgtcgacctgatcgccatcctccgccccaccgagtcggtgagtctttaccaacagatcgttggccgcggtctgcgcctggcgccggggaaaaccgactgtctgatcctcgactacgccggcaatccgcatgacctgtatgccccggaagtggggacgccgaagggcaaaagcgacaacgtgccggtgcaggtcttctgcccagcctgcggcttcgccaataccttctggggcaaaaccaccgccgacggcaccttgattgaacactttggccgccgctgccaggggtggttcgaagatgacgacggccaccgcgaacagtgcgacttccgctttcgctttaaaaactgtccgcagtgtaatgcggaaaacgacatcgccgcccgccgttgccgggagtgcgacactatactggttgacccggacgatatgctgaaggcggcgctgaaactgaaggacgcgctggtgctgcgctgcagcggcatggccctgcagcacggcggcgacgagaagggcccgtggctgaaaatcacctactacgatgaagacggggcggatgtcagtgagcgcttccgtctgcagacccccgcccagcgcaccgccttcgaacaactgtttattcgcccgcatacccgcacccccggggtgccgctgcgctggataacgccggcggatatcgtgacccagcaggcgctgctgcgccatccggactttgtcgtcgcccgcatgaaggggcagtactggcaggtgcgggaaaaagtgttcgattatcaggggcgttttcgtcgcgccaacgagctgcgttaattaccggaaagctgaggttttgattgcccgggtgtcgtttggcggctataatgccgcccgcttttgcattcgcaaagcagataatccgcctgttgctgggtcgcctgtagcaggctttatatatagagagacatcaatgtttactatcaacgcagaagtacgtaaagagcagggtaagggtgcgagccgccgcctgcgcgcagctaacaagttcccggcaatcatctacggtggcgcagctgctccggttgctatcgaactggaccacgacaaagtatggaacatgcaggacaaagctgagttttacagcgaagttctgaccgtcgttgttgatggcaaagaagaaaaagtcaaagttcaggctgttcagcgccacgcgttcaagccgaaactgactcacatcgacttcgttcgcgcgtaatcgccgatagcaagttgtatggcaagcgccccggggtctcaggctccggggcgttttgttatctgcgctgccaaagctccggcgcctcgtgcacgatgtcgctaagcatccgatgcttattcattccgggcagccagagcatcaccatagtgacgttcagcccctgactgccgacctccgtcgcgatttcactgactccctgccactcgcctggccgcaaatggtccggtaaaaacccccagcccctcccctgctccagcgcatggcgcaacagggtaatctcattcatatacagcgtatggccggaaatctgcagccggcgggcgatttgatcgtcactgcgccggtgcatcactaactgcggcgtcaacgaaagattcaatagcgtcagcggccgcggagcgtcgtggaacaggctgtccgccgcgtagaaacgcagatccacggtgccgagcgcccgccactccatttcgctccccagcgtgcggttgttagcctgacaaatcgccatctccgccacgccatcgctcagcgcctgctcggcttcgcgacgcgaggcgctccagcagctcaggcggatctgccgtcgggccaggttatcggccagcgcacagagaaattcacgcggcacgaagggatcgtacaccagacgcagcgcctgcccggcggtttgcggcagcgtttgcgcaaaagactcgaaagcctgcgcctgacgcaacagcagatgcgcctggcgaaacagctgctcaccctcggcagttagcgtcaggctacgtccttcacggctgaacagccggtagcccagagcatcttccagatagtccagcagatcgcgcagcgtggtccggtctttagctaaacgaatggccgcctgcgacaggctgccggtctcagcaatcgtcgcgaaggcttcaatctgtgcgaatgagtactgtagggttttcatcctttttctcccttaagggggaaaatcccccatgtgctgattttagccggcgcgcgccgatttatatactgcgcagcgaatctatggcaaacgaggaaatgacaatgataagaaaaccactggccctggcgttaatattggcggcgctgccggcggcggcaatggcgcaacactgcggcagcctgacgctggatgtctgcccaacgccttacgatcaaacgctacccgcggccaaagacatgctcagctgggatcagacttcacgcgtgattggctttcgcaatgactatcgcaactatatcggcgatgtcttccgccacggcgcctcgacgccgctggagcgcgctgaaaaacaactgaccgatgcccgctatacgctcaacggccacacctggaatttgcaggattacctgaagcgcgagaacgtcagcggtatgctggtgctgaaagatggtaaagtcgcctggaaatatctcgccgaaggtaataccgacaccaccctgtggacctcgcgctcggtaggcaaatcggtggtctcgacgctggtcggtatcgccattcaacagggtaaaatccactcccttgatgacctgattaccgtttatgaacccgaactgaaaggcaccgcctgggacggcgtaacgctgaagcagttgattcaacacaccagcggggtggaatggaatgaagactacaccgacccgcagtcgcatttcgcccgcctgacccagtgtgaagcgcaccccggcgtctatgcctgcgtgcgtaagatcgtcaccggcctggcgcgtcaacacccggcgggcgagcagtggtcctactcttccggcggcgcctggctgcttggggatattctggagcgcgccaccggcatgtcgctggccgcctggcttgaacaggctctatggcagccggccgggatggcccacgacggcgtgtggcatgcttatcagcaagggaagcacgacgtcggcgcccacggctttaacgccacccttgaagactggggccgctttggtgaattcgtcgcccgtgacggtcggttaagcaatggcaaacagctggtgccgactggctggttcgatcaagccgccagctggaccaaggcgctaaactcggtctcggcagcgcatccggagggtatttacggctatcagtggtggaataacgcaattccggcgaatgcgcaaaacgtccagccgacgccgcaggaagggcttaaagggtcgctgtgggcgctggggatctacggccaggtgatcatggtgaaccgcgcggaacacctggtgatcgtccagtggtcgacctggccgcaggcggaaccttccttcaacgctcagccgttggaagcggcgctgatgtacagcgccattgcccgcgagctgcgttaactccccgctccttgccgctcagccggcgaggagcgtgtcggcattcagcgccaggtgttgcagcaggataatggttttagcatccatgatctcgccatcgcgaatggcctgcagcgcccgcgtcagcggccactccagtacttcaatgtcctcaccttccgccgccagtccgccgccgtcgccccgacggtcatcggcctgatattcggcgataaaaaagtagagtttttcggtgacggagccggggctcataaagacggtgaagacgggttcgacacgggtcacgcgaaagccggtctcctcttccgcttcggcaacgatccgcgcctccggcgaggcgttatccaacagcccggcagccgcctcaatgagatatccgtcgtggccatgagtaaataccggaaaacggaactgacgggtcaggaccaccgtccgcttttcccggttgtagagtaaaatgactgcgccgttgccccggtcataagcctcgcggctctgctcctgccagcgaccgtcccgacgcagcagttcgaaggtatattttttcaacgtgtaccagttatccgagagcagcgtctcgcgaacgtggcggacgtgcggtgcatgtgtttgcatgttatttcccctttgaggtgacagcaggcaccataacatgcataatcgtgcacaaacaagatcattcgatgaaggaaaaccgatgctcgccagtcagagaaaacagcagatcctccagatcctcaccgaggaaaaacaggtgatgtccggggagctaagccagcggtttaacgtctccgaggactccattcgccgcgatctgcgcgagctggcggcggagggaaaactgcagcgggtccatggcggggcattgccggtttccgccgccattgcgccaattgaaacgcgcaaaagcgtgcagatcgactccaagcaggcggtcgcccgcgccgccgccgccatgatccagccgggacaggtggtgattgtcgatggcggcaccaccaccgcggcgatgatcggctttttacccgccgacctcagctgcacggtggtcacccacagccctggcatcgccgtggcgctggtggaccatccgcgaatcgaggtgatcctgctcggcggcagagtatttaaacattcggttgtcgccgtcggcgccgagacgctggcgggaatggcgcggatcaacgccgatctgttctttatgggggtgaccggcgtccacccgcgggcgggtttcaccaccggtgattacgaagaggcaggcatcaagcgcgcgctgacggccagggcggcagaaaccgtggtaatggcctcccgggagaagctcaacgccgcgtcggcctttgccatcggcgagctgagcctcgccagtacgctgattgtcgatggagaacccgacgccgcgctgcgccaacagttggtgcagagcggcgtggagatcgtccccgttcagcagtagcgccgacggggcgcagggcttaattgccgcctgacgtccggcgctgcagctggtcgcgcaggttcggcggggtacccttaatggtcagggtatcagtggcgggatcccagaatacgcgttcgcccagcagcatggcgtcgaagttaatggtcaatccgccgccgctgccggcaaacttggtcagctgacgtaaggtgctgcgatccgccgggaagctctcttccagctcatagccctgctcagcggtgaattcctggaagctcttttcgctgacgccggcgagctctttggacagcgactccagctcaatctcttccccagcctgcagctgttcgttgcagtaggcgtagacctgctggcgcacgttctgtcgctcggatttatcaagctgggcatcggcggcgaagtcatccaccgcctgcagcaggccgcggttctgcgctttggcgttaagcccttcgctggcgccgaggaaatccataaagaaatcggccactttgcgccctacccgccctttcaggaaggtcagatagcgggtcgactccgggttggtttcccattcggtgagatcgatgcgcgcgacgatatcggcatggttaatatccagataatgggtcgagcggatatccagctcttcgttgacgcgcatactgctcaggttattgagtaccgccaccagcagatactcgaccgcaaggtaacgatactggcagaagaggacaatgcctccttcggcgaacgggtatttcgccagctcatcgcgcaggcgaccggtcgccgcgcggctaaacgccagaaactcttcttccccctgacgctgcaggcgcagcgcctgggccagttcgctctcttcattgaacaagccataggctttgcttttggcgctatagacccggtgcagttcagccatcatctcgacgaccgtcgcgttcggctccaacagtgactcgcgcagcaccagctccagattttgttcatcacgtttgattaactgatgcagggcaatctggtcgatatccagactcatgttaaactctccttttagaccgggcggtattcaaccaccgccgggtggccgacgcaactggcgccacacatttcgacgtcgttaacgtcgattgatgcgcttttgcgccgcggcgaaaaaatgcggaaaaaaagctgctgctacggtaatatgttgccctttcacgaacaaacagattttgagtttatgccgcaaatttcccgctatagcgatcaacaggtcgaacagttgctcagcgagctgacgaacgtcctggaatcacacaaagccccggtggacctttcactgatggtgttaggcaatatggtgaccaacctgatcaacagtagcgtcgcgccggcgcagcgtcaggccatcgcccgttctttcgcgcaggctttgcaatcttcgattaacgacgatccagcgcattaaggataacagcaacagtatatggtgactctacgtcagccctaccgagaaaaagtctcccagatggttagctgggggcactggttcgccctgttcaacatgttgttggccatggtgctcggcagccgctatctttttgtcgccgactggccgacgacgcttgccggacgactgttttcgtacgtcagtctcgtcgggcatttcagctttctggtgtttaccagctatgtgctgatcctctttccgttgacctttatcgtggtctcgcagcgcctgatgcgcttcctgtcggtgatccttgccaccgccgggatgacgctgctgctgatagacagcgaggtttttacccgcttccatctgcacttaaacccggtcgtctgggagctggtcatcaaccctgaccagaatgagatggcgcgcgactggcagctgatgtttatcagcgtcccggtcatctttttgattgaaatgctcttcgccacctggagctggcaaaagctgcgcagcctgacgcgccgccgccattacgcccgcccggtcgcctggttcttctttttgtcgttcgtcagcagccacctggtctatatctgggcggacgccaatttctatcgcccgatcactatgcagcgggcgaatctgccgctctcctatccgatgaccgcccgtcgtttccttgagaaacatggcctgctcgacgcccaggattatcagcgtcgtctggtggagcaaggggcgccggaggcggtatcggtccagtatccgcttagcaacctgcgctaccgtgacctcggcgcgggctacaacgtgctgctgatcaccgtcgacaacctgaactactcgcggtttgaaaagaccatgccggcgctggcggcatttgccaaagaaaacgttaactttacccagcatatgagctcgggcaataccgccgacagcggcctgtttggcttgttctacggtatttcgcctggctatatggacggtgtcctctcggcgcgtattcccgccgcgctgatcactgccctcaaccagcagggctaccagctgggcctcttctcctccgatgggtttagcagcccgctgtatcgccaggctctgctctccgatttctcgctgccgagcgcgaagacccagagcgacgagcaaacggccaatcagtggatcggctggctggaccgttacgcgcaggatgagaatcgctggttctcgtggatctcgctcaatggcaccaccctcgacgacacgcagcagcagggctttgtccgccgctacagcaaggcggctggcgacgttgatgcccagatcgatcgggtgctgactgcgctgcgcgaagccggcaaactcgataatacggtggtaattattaccggcggccacggcaagccgctgaatgcgaaacacgacgcgttcgactggtcgcgcgagcagctgcaggtgccgctggttattcactggccgggcacgccggcgcaggagattgccaccctgaccgataacaaagatgtgatgactacgctgatgcagcgcctgcttcacgtttcgacgccggccaatgagtactcgcagggagaagatctgttcagcgccgcgcggcgtcgtaactgggtcaccgcggccaacggcgatacgctggccatcaccaccccgaccatcaccgtggtcctcaaccataacggcacctataccacctggagccgcgacggcgagaaaattaaagatcagaaaccgcagctcagtctgttgctgcaggtcctgactgacgaaaaacgctttatcgctaactgattgattaattatgaatcaatcgcgcgtgacccgcttgcattcgcctggggaacgggtaatattgttccccacgcgtcggcacgtagcgcagcctggtagcgcaccgtcatggggtgtcgggggtcggaggttcaaatcctctcgtgccgaccaaaaactccacagaaaccagccttttaaggctggtttttttatgcctgtttcccctgttgccgcccgctcgcttaatttgtgccctttcttcaatgtatcgtgaagatgtacgactatcctgatggtaaattacgtcgtagcatctattattcgaccgtatgactcataagcaggagcggataacatgagagttaatggacttaccaagggatttttcatccttatcgtcttcattgtaaccctggccttttttgatgttctctcaccctattattccgccatcctttgggctgcgatcctcgcggtgatttttaatccggtcaaaaacaagatccgtacccgcctcggcgagcgcaatggcctcgcggcgctgatgaccatcgtcattatctgtcttatcgtttttacgccgctggctatcattctctcctcgctggcctacgagctcaacctggtgtacagcaaactgcagcataacgacacccagtttccgacggtggtcgccagcctgttcgcccatctccccggctgggccagaagcttcctcgccgatcataaccttgatagcgcgcagcagatccagcagcagctctctgatgccgctctgaaaggcggtcagtatctggccggcagcgcgtttctgattggcaaagggacttttggcttcaccgtcagcttcggcatcatgctgtatctgctgtttttcctgctgaaggatggaccttatctggtgctgttgatcctcgagtctctaccgttatcaagctatgtgaagcagcatttgttcgctaaattcgccgctgtggcccgcgccacggtaaaaggtactgtcgccgtggcgctggcgcagggggcgctgggtggctttgccttctggatcgccggtctggacggcagcattctctggggagcgctgatggcgtttctgtcgcttatcccggcggtgggctcggccattatctgggtgccagcggccatctacctcttcgccaccggccagctgtggcagggcgcctttatcgtcggcttctttgtgattgtgattggcctggtggataacattctgcgtccactgctggtgggcaaggataccaggatgccggactatctgatccttatcgccactctgggcggcatggagatctacggtatcaacggcttcgtgatcgggccgctgatcgccgccctgtttatcgcctgctggaacctgctgtcgggacgagaacatgccggcaataccgatgaaatcgatgaagagtttattgaggaagcgaaaaatagccgtaatgaatagctttcctggcagggggctggcggcccgccagcgcctctgttgcgctctgcgcggccgatgtcttaccagtagataacactattcattttgcaaaaaatggtaaataaatcttaacattcagctgagtgatgataggctatctctgtcaggaacgaaaataaaggatgatcaaccgtgaaaaaaatcactacgctagccgtttctctgctgaccgccgcctgcatgtccgctggcgcattggccgcagaccagccgctggaaaaagtcgcgccgttcccgaaagcggaaaaaggcatgaagcgtcaggttattcagctgcctcagcagcaggatgagtcggcgctcaaggttgagctgatgatcggccagacgctggaagtcgactgcaaccatcatcgtctcggcggggaactggaaagtaaaaccctggaaggctggggctatgattactatgtctttgagaagctgagcggcccggtatccaccatgatggcctgcccggacggcaaaaaagagaagaaatttgtcactgccggcctcggggatgacgccatgctgcgctacaacagcaaactgccgatcgtggtatacacgccgagcaatgtcgatgtgaaatatcgcatctggcgcgccgacgagactatcggtaacgccgtcgtccgctaaggcgaacagcgcaaacggcataaaaaacggcagcccgcaggctgccgtttttgtcagagcgtttatcagagcgcgatatccgccatcggcttgccgccgctcagcggcttcagctccgcctgcggtacctcatccaccgccccggctggctcatatttcagctccagcacttcactggtccacgccagcgctttctcgatctccgccgggttgccgtcaagacgaataccgtaggttgggatgatcgccttcagcttggcctgccattccggcgaattgactttatctttaaacactttttccattagctgcagcatgataggcgccgcggtagaggcccctggcgacgcgccgagaagcgccgcgacggtgccttcatcatcgctgaccacttcggtgcccaggcgcagtaccccgcccttcttcgcgtcgcgcttaatgatctgcacgcgctgaccggcctgccacaaccgccagtcctctttccgcgcttccggataatattcgcacagcgcggccagacgatctttatctttctgcatcacctggctaatcagatattttaccagatcgaagttgtccaggccgacgttgagcattggcaaaatatttgaggtattcgtcgaggccagcagatcccacagcgacccgttcttcaggaaacgggtcgagaaggtggcgaatggtccgaacagcaccacgcgtttaccgtcgataatacgggtatcgatgtgcggcaccgacatcggcggcgcgcccacttcggcctgaccgtagaccttcgccagatggtggttcaccacctccggattttcgcagaccaggaactggccgccgaccgggaagcccgcatactctttggcctgcggaatgccggtctcctgcagcagggtcagcgctgcgccgccggcgccgataaagataaatttagctttaatgacccgcttctgacgacgattgtcggcatccgccagggtgaccgtccagctcttgtcggcgttgcgcttgaagcgacgcaccacggtgcccagctgtagggagaaattatcatgcttttgcagaccggcgatcagctggcgggtaatttcaccatagttgacgtcggttcccacttctgagcgagtggcggcgaccttttgcagcgggtcgcggccttccatcaccagcggcgcccaggctttgatctgttgatggtcttcagaatagcgaataccgcggaacagttcactttgctgcagcgccgcgtagcgcgcacgcaggaagttgacgttatcttcgccccacacaaagctcatgtgcggcacgctgttaatgaaagattttggtttgttcaggacgccgcgcgtcacctgatgcgcccagaactgacgcgagatatggaaggcttcgttgatgtcgaccgctttgtcgatattgatgccgttggcggtctgcggcgtgtagttcagctccatcagcgccgcgtggccggtacccgcattattccacccgtttgagctctcttccgccacgctggacatctgctcaaccatggtaatagaccagtctggctcaagctcctgcagccaggttcccagtgtggcgctcataatgccgccgccaatcaacaatacatccgtctcttgctcatggcgggtgttggtccgagtgctgttgggaccaaccgcctgtgagcgtggtacggccatctttttattcatcggatttgagccttactttactcgctgtttttatttagcgcaggtgatacgattctcacccctcacgttaccaccgaagctcaaaaatttaaatattgtttaaattttaagttctgttttgagatccgttataaaaatgtttaataaatgtatacaccaaatcactttttgtactggtgcgctgacagattccgcgctatcatccctggttttgtgacagaccgcacggaagcagggcctgacaccgctccctctttttttataagctgcgaactttttttatgcccccagtttctgaccccgccgcttccggcaacctgcgtcccatcctccgctccccgtctttactgacgcgcgaagtgctggccggcgtgctcaccgccctggcgctcatccctgaagtgatttcgttttcagtcattgccggcgttgacccgcaggtaagcctgattgcttcggtggtgctctgcctggcgatgtcagtcttcggcggacgcccggcgatggtcaccgccgccgcgggctcggtggcgctggtgattggcccgatggtgcatcagcacggcgtggggtacattttaccggctgtcattctggcgggtattattcaaattttgtttggtctgtgcggcatggcgcgcctgatgcgctttattcccccggcggtgatgaccggcttcgtcaacgcccttgggatcctgattttctttgctcaggtgccgcatttctggagtcgacaaccgctaatcgttggcctgttcgtcctgacgctgcttatcgtcctgtgggcgccgcgcgttattaaggctatcccggcgccgctgatcgccatcgtcgcgctcaccctctataccgcgaccaccggccagcagctgccgaccgtcggcgatgaagggtcaatgagcggcggcctgccggggttcaccgccctgaccgttcccctgaacctgaccaccctgcagataatctggccgtgcgccctcagcatcgcctttgtcggcctgatggagtccttgctgacggctaagctggtggatgatctcactcataccccgtcgaacaaatcgcgggaaagcgccgggctgggtatcgccaatatccttgccggctgctatggcggcatcgccggctgcgcgatgatcggccagactatcgtgaacgtggaaatgggccgggcacgcagccgcctctcaacggtaatcgccggcctggtgctgctcctgctggtgacagcgctcagccaggtgatggcgaagatcccgatggcggttctggccggggtgatggtgatcgtggcggtgaaaacctttagctggcacagcattcgcccgggtgagctggcgcgtaatccgtggccggaaacgctggtgatgctggtgaccgtcgccgcgacggtgggaaccagcaatctggcgatcggtgtgctggcggggattgtcgcgatggcgatcatcccccgccgcctgcgggcaaaagcgcaggctacatcagaaacagcgtcgccagacccagaaaaataaagaagccgccggtgtcggtgatggcggtgatcattacgctggagccgaccgccgggtcacgccccagcttcaccatgaccatcggaattatcacgcccatcatcgccgccatcagcaggttgagcatcatggccagcgtcatcaccccgccgagctgcggatcgtcatacagccaccaggtgatggcccccataatcccgccccacaccaggccattaatcagcgcaacgcccatttcacgcaggatcagaaaggtaaagctgccgggctggatctgctgcagcgccatcgcccggacgatcatggtgatcgtctggttgccggtgttgccgccgatgccggcgacgatcggcatcagcgaggccagcgccaccagctgtgaaatggtgtgttcgaagccgtcgatgacccgggaagcaataaacgccgtacacagattgaccgccagccatgcccagcgggttttcaccgctttgctgaccggggcgaagacatcctcttcatcgctcagaccgcccatccgccgcagatcgttatcggtttcttcataaaccacatcgacgatctcatcgatggtcaggcgcccgatcagcttgccgtcggcatcaatgacggcggcgctgagtaagtcgtcgcgttcgaaggtgcgcgccaccttctccgcctcttcgtgcggctgaaaggtgaccgggtcgccctccatcacctcccccacccgcttctgcgcatcattgagcagaatggtctgcagctccagctcgccgagcagcagcttgttacgggtggtaacgaacagcttatcggtgttttccggcatttttccgagacgccgcagatagcgctgcaccgccgccagggtggcctccggtcgcaccgtaatgacctcaaactccatgatcgacccgacgctgttgtcggcgtagcgcataatctggcgaatacgggcgcgcttctcggccggcagggtcgccagcagccgtccggtcaggttgcgcggcagatgctgcagcaggtaaacctgttcatcgatatccagcggctgcatggcctgcagcagctcggggtcgctcatcttgtcgatcaggtcgccccagacgttctctgaggcctccagcagcacttcgccgcgtttatcgtcgggcaccaggcaccatagcgcggtgcgggcgtcatagggaagcgcttccagcgcatcggcgagatccggcggaggcagatgcgagaccagcatttccacttcggccaggtcatcggccagcgtcccttcatcatatcgttcagccagcgtcagtttgcccagcagcgcggaagtcaccgctttatcggtgctcaagagccaaatcagacgggcgcgctcttcgtcacgcaagcgggcgctttttttatgcaaaacggacatcgatcgggcaatccttttgagaatggtgagccggcctgcgggccggaagccttaagcatagcgcgaggagggggaaataataaccgtcagcgatgtagacgctgaaaatttcagcggcgcccgggcttttccccgggcgcgtggcgattgtcaggccgtacgggccaccgcatcgcgggaagcctgttcccgctcttcgccggtaagttcggcgagctggccggcgcgcatctccagcagacgatcggcgtgctggaagtagtgatcgtcatggctgatggcgaacacggttttgcccatctgctgcatcagcggcagcaggacctggtagaactcgcggcggaaatgcggatcctgatccgccgcccattcatccagcagaatgatgtcccgggactcggccagcgccagcaggagcgccacgcgcttcttctgccctttcgacagccgcaggtcggcgatttttccgttctccagctgcagcttgtgagccatttgcagacgctccagccatgtcgccaccagcgccggatcggcctcctcgccctgcggcccgagcaggcggtcaaacagccagacgtcggtaaacactgcggaaaacagtttgcggtactcctctggcctctccgccgccagcggctggccgtcgacgaggatctgaccggatattggctggtacaggccggtcaggagcatcgccagcgttgacttgccgctgccattgccgcctatcaaaaacaccagctcgccgcgcttcagcgtcagattaagcggccctaccgcaaagcgctggtccggataatggaaggtgacatcgcgcagctccagcgtctgccagtcaggatgcgcctgcggccggggaaagtcggcccggtacggggcgagggagaactgacgcagcttgttaaacgccacctgggcgctgagcagcgtgggcagcgcgccgacggcggagagcagcggcgtgcgcagaaacagcagcgtcagggaataagtcgccgccacggcggtatcggcccagccgaggctgttggccatccagaataccagcccgatggcgccaagcatcataatattcgaccagttgaccgcgctgaggtggaaggtatcggcgcgaacgatatggtgccggtactcccgggcgtccgggaggtagagctggttaaacacatactccgcgcgctcgcggttgagggtcagctctttacgcccctccagcaccgtctgatagtcgtgatacagtttatcttccgtttcgcgcaggctggccatatgtttgtatacccgcgagaccagcacaaagccgccccagatggtgagcgccatccacagcgccgtcaccagcatcatttttcctgacagccaggcgaggtaggccgcggagccgaaggtgagaatgatcccctgcaccagctccggcaggcgcacaaaggcgatggtgatattgcggatatcgctggtcagcccggcaagcagcgacgcgctgccgatcttctctacttgttcaatctgggtatcgaggatgcgtttaacaaactcaccgcgcagacgatagacaaaatggtggccgagggtggttagcgccagctgcgaacccagggtcaccgccatcagcagccccagcagaccaagaaactccggcaggacccgcagcgaggtatcgacagaggtaatcagacgcaggttaatgaaagcgattaagccgatacccagcgcggcgctgagcaggctgagagcaataacgcccagaaacggccagcggtactggcgccagacgagagagagaagttccataacaggctatccgcaaaagcaaaacagccagcagtttaaacggctcgccgatgacatcaagaataattcttattttaatactggcgaccgcccgcctgtcggaaggtgagattgtaacgacagtcgcccgtttccggatgatgccccgctttcagcggctgaatgccatgataaaacaggcgcgactcgccgccccagaccaccacatcgccatgctccagcagcagccgctgcagcgggtcgctgcgttgcaagccgccaaactgaaagatagccggcaagcccagcgagaccgagacaatcggcgcccgcagatcctgttcatctttatcctgatgcaacgacagttttgcgccaggacaatagcggttaatcaaacaggcgtcgggggaaaactccgggtagccgccggcggcggccgccgccagcgccagttcatgaaatacggcaggcatcggcggccaggtttgatcggttaccgggtcgaccggggcgtacaaatagccgtggcgatcggtagtccagcccagcgcgccgcagttggtcatggcgaccgacatggtgtacccgcccggcgtgaccatctggcgaaacggcgactgactggcgacgtcggctatcgcctgcagcagcgccggggcgcgttcgcgggcaaatcgccgcagcaccaccgcgccgggggccagcggctcctgccacggtggggtatcgctaaacagatcgagcattactcctcctcatattgggcctcgcgcgccagcagctgcgcttttcgcgccgttccccagcgataaccggacagggcgccatcttcacgcaccacccggtggcagggaacaatcaccgccagcgaattcgccgcgcaggcgccggccacggctcttaccgcccgcggctggccaatatgctctgccacctggcggtagctgcgggtctcacccgccgggatctgccgcagcgcctgccagacctgcagctgaaacgcggtgccctgcagatccagcggcagcgataccggccgccggctgtcgtcgaggtgggcgaaaatctcggccatctgctgacaaaaatcggggtcgccttcacgcagctcggcattgggaaagcgccggcgcaggtcgtcgagcaatgccgcatcgttatcacccggcagcaccgcgcagacgccgcgctcgctctgcgccaccaggcaacgacccagcgcgcagtcgcccgtggtccaggttaccacggtggcggcgccgccgcggcgaaactggctggcggtcatccctaacgctgcgtcggcctggcgataatagctgctgctgtcgggaaaaccagccgccagcgcggcgcgggtcaccggtatcccctgctccagcgcttcccgcaggcgctgcgaccgccacgcttgttgccaggctttaggggtcatgccggtgacggatttaaataaacggtgaaaatgaaacgggctcatcgccagctggcctgccagcgcctcgagggtcaggggcgcgtcctgctccagcagccgacaggcctgcgccactttgtcgaccctttgctgctgcgggtagtctttatccggttggcagcgtttgcaggggcggaatcccgccgccacggcggcggcgacgtcggcaaaaaagcgtacgttttcccgccgcgcgcgccgcgagcggcaggagggacgacagcagatgccggtggtcagtaccgcaaagacgaactgaccatcggcccgggtatcacgttcgcagaccgcctgccagcggcgatcatcggtatcggcaactatcggtttcatgacgggtctccagctgtaagtgtacgctcagtctgtggtaaagcccgcagtaaaaaacccgcaatcttgctttttaatttttctcgctgacaaggaaagtgcggaactgcggcgacatccaggttttaaaaccctctccttctttaacgatcatgtagaccgccagcccctcctcgcgcaccacctgctgcgctttttccggccccagcaccatcagtccggtatcccagccgtccgcctccagcgccgttggcgcaatgacggtcacggagaccagcttatgggttatcggctgcccggtctgcggatcgataacgtgcgagatgcgtttgccatcgagttcatagtagttgcgatagctgccggaggtgctgatgccgtgaccattgatgtcgacaatcgcctgaacggcgttttcgcggtcggtcggtttctggatcgctacccgccagggcttgccttcgccgttcatcccgcggctgaccagcgccccgcccaccgacaccagatagcgggagatcccctcctgctccatcaaccgcgcgaggtggtcggcggcatagccttcccccacggtggagaggtcgacaaacagatcgggaatatctttttgcaggaactgcctgccgctctgattgataacctgtagatgctgcaggccggtgcgcgctttcgccgcggcgatcgcctgcgcatccggggtggtgaccggctgtttatccgggccaaagccccacaggttgaccagcggccctacggtaatatccatcgcgccgtgcgttttggcgccaatccgcagcgacagggtgacgatatccgccatcgcttcgctcaccggccagggttcggtagtggcggcatgattgaagcgcatcagcgctgagtcgtttttccaggtcgacagcaggcgatcgtcggcgtccagctgggcctgaaccttggcgcgcaacgcctgggcctttgcctcatccacgccaatgacgctgacccgccagaaggtgcccatcgttttgccatccagcacggtggccgtcgcggtgggggtcgcaggagtggtagctgaatcgcagccagagagcagaacgcaggcgcccagaagcgcggcgcgaaagaaagtcatatccattaatcgaggctcctcttaccagggcgacaagagtataccagcgaggttaaaccggacataaaaaaaggcgccagaggcgcctttttgttatgcagcttgcaacttagaactggtaaaccaggcccagtgcaaccacgtcgtcggtagagataccagcgcgacgagtgaaatcgttttcgtccagcaggttgattttgtagtcaacataggtggacatgtttttgttgaagtagtaggtcgcgccaacgtcaacatatttcagcaggtcctggtcgccgtaaccttcgatgtccttacctttagactgcaggtaagctacggacggacgcagaccgaagtcgaactggtactgagcaaccacttcgaagttctgtgctttgttagcaaaaccgctaatagaatcagattctccgttgccgctgaaacgagttgcgttgtaagtctgggtgtactgagtcgccaggtaaatgttgttggcgtcgtatttcagaccaccggtgtaggtttcagcgttgtcgccacggcctttatccaaacgattctgatcgccgttacgtttggagtgcgagtacgcgaaaccagcgctgatgccatcatagatgtcataggtcagagaggtaccgaagccgtcaccgttctgtttcagagcgccacgaccgttgttggtcggagaagtaccttcgccgctgacgctgccgtttttaccctgatactgcagagcaaagttcaggccgtcaaccagaccgaagaaatcagagttacggtaggttgcaacgccgttagcacgggactgcaggaagttgtcagaaccgtaggtgtcgccgtcgccgccgaattccggcagaacgtcggtccaggacgttacgtcgtatactacgccgtagttacgaccgtagtcgaaagagcccgcgtcgccaaatttcaggcctgcgaatgccagacgagtccatgcctgatcgctggagctttcagtgttgttcgcctgaacgttgtattcccactggccgtaaccggtcagctggtcgttgatctgggtttcgcctttcacgcctacacgcatgtaggtctggtcgccgtcgacgctcttgtcgtcagagaagtagtgcagaccgtcaattttaccgtacaggtctaatttgttgccgtctttgttataaatttcagccgcatttgctgcgcctgctaccagcagagccggtaccaggagggacagtactttaactttcatgttattaaccctctgtttgttatatgccttttattatgccactgcttactgattacccttctaatcagtcggctatttcattgtgctgcaaaatgcagaataatccaacaagaatatgatactaaaacttctaagatgtttcaaagttcccacaagatgtttcaatttgtaaatttagcggaacttttttcaccgcaaaatggtcagggaaatacgcactaatcatcaaaaaaaatatttaaccttttataatcaaagtgatagtcgacaagatatctatagcactgaatggtaaaacaaaatgatcattggtggctaaaataagagtcgctatcatcattaactttatttattaccgtcattcagttctgaatgtctgtttacccctatttcaaccggatgcctcgcatccggttttttttacccttctttacacaactttaatttatctgtgctaaggctaatgattccctaacgactattaatcaatcaattaggccatcagtggtgcatattctgccaatgtcttgttatttcgtgcgattcttcccttttgtttccgtcaatatcgtcgccggttaaccttcccggcgcggtttcatttacgcttcgtttctaagataatttctgggcggcatcgcaccgctggcgccaatctgtagtatggatttacgccattagcctttatactgccagcagcatctgctttgttgccagttactctggcgctacatcctgtttacaaacaatgatgagtcgttcagccacaagatgaccccgaaaaaattctccctgatccccggcaacatcagccgcttcttcattttgatggttattgtcctgctggcgacaatgggggtgatgatccaaagcgccgtcaatgcctggctgaaggagaaaagctatcaggtggttgatgtctcccacgctctgcaccagcgcattgacgcctggcgctatgccacctggcagatctacgacaatatcgccgccacctcagtcaacaccgcaagcggcggtctgcaggagacgcgtttaaaacaggacgtttactacctggagaaaccccggcgtaaaaccgaagccctgatctttggctcccatgacagctccaccctcgaaatgacgcagaaaatgtccgattatctcgatattttgtggggcgcggagaccattccgtggtcgatgtactatctcaacggcctggacaatagtctgatcctggtctccaccctgccgttgaaggacctctcttcgagcttcaaagagtcaacgatcagcagcgtcgtggagtcgcggcgcgcggaaatgctgctgcaggctaatacccttgatgagcgcgagacgttctcgccgctgcgccatctcgcctggcagaacgcgcactattttacgttacgcaccaccttcaaccagcccggacaccttgccacggtggtcgccttcgacctgccgattaacgatctgatcccgcccggcatgaccatcgacagcttccgtatcgagcctgacccgtcgcaaaatctcgccaccacgccggataaagagagcgccgatcatatcgggatcacctttaacggcatgcagattgacatcgccaccgacatcagcaccaccggtatgcagttgctgtggacggtaccaatgagcaccatgctgctggagtccatgcagaacattcttctgccgctgctgctcaacattggtctgctggcgctggcgctgtttggttttaccacctttcgccactataaaggacgcagccattcgtctggcgccgggctcccctccgccgccaacagcgaactgcgtctgctgcgcgccattaacgaagagattgtttctctgctgccgctggggctgctcgttcacgatcaggaagccaaccgaacggttatcagcaatccaattgccgaccatctgcttccgcacctgaatctgcagaacatcaccaatatggcggaccagcatcagggggtaattcaggccaccgtcaataatgagcagtatgaaatccgccagtatcgcagccaggtagcgccgcgcacccagatcctgatcatccgtgatcaggaccgcgaagtgctggtcaataaaaagctcaagcaggcccagcgcttgtatgagaaaaaccagcagggacgggccgcctttatgcagcacatcggcagcgccctgaagcagcccgcgctgacgctggcggcagaggcggcggcgctcagtagtacagagaatcggacgctggcccagcatgccgatgagctggtcaaactcatcgatgacattcagctcgccaatctgctggaaagcgatgcctggaaaaccaaccagacgttgttctcggtgcaggagcttattgacgacgtcgtgccggaagtgctgccggcgatgaaacgcaagggtctgcagctgctcatcaacaatgcgctcccggccggcgagcagcgctatggcgaccgtgaagctctgcggcgcacgctggtgctgttaatccaatattcagtgaccaccacgcctatcggcaagatcaccctcgacgtctgtcaggatgagtcggccagcgatcgcctgaccttccgcattctggataccggcaacggcgtctcggcaaacgagatcgacaatatgcacttcccgtatctcaacgagacccagagcgacctgtacggcaaagcaaacgcccttaccttctggctatgcgaccgcatgacgcgcaagctgggcgggcaattgaccattaaagcccgggagtcgctggggacgcgctataccctgcatctgaaaatgccggccagcgaagaggcgccagaggcgggagagcatttgctggatgacgttatcgtcctgctggatgtgacttccagcgaagtgcggcggattgtcactcgccagctggagagctggggagcgtcctgcatcacaccggacgatcgggcgaccagtcaagcctttgatctttatttaacggataatccgtctaatcttactgcttcaggcttgcttttaagcgatgatgaggtcgggatacgcaagatcggcccgggccaactgcgggtcaactttaatattagcacggcgatgcaggaggctatcctgcagcttattgagcagcagctggcggaggaggcggttcagcccgtcacctcaggaaacgagagtaacgccgaactccatgccagcggctattacgcactgtttgccgatacggtaccggatgatgttcagagattgtatactgaaatcgaagcgggcgattttgctgctctggcgcaaaccgcccaccgcctcaaaggggcatttgctatgcttaatctgatacccggcaagcagttatgtgaaacgcttgagcatctgattcgcgaaaaggatgcgcaaggcatagaaaaatatatcagcgacattgacgcttacgtcaagagcttgctgtagaaggtagccttatacatgaacactatgaacgtaattattgccgatgaccatccgatcgtactgttcggtattcgtaagtcacttgagcaaattgagtgggtgaacgtcgttggcgagtttgaagactccacggcccttatcaacaatcttccgaagctggacgcccatgtgctgatcaccgatctgtccatgcccggtgacaaatacggcgacgggatcacgctgattaaatacatcaagcgccacttcccggatctgtcgatcattgttctgaccatgaacaacaatccggcgatcctcagcgcggtgctggatctggatatcgaagggatcgtcctcaagcagggggcgccgaccgacctgccaaaagcgctggccgcgctgcagaaagggaagaaattcaccccggaaagcgtctctcgcctgctggaaaaaatcagcgccagcggctatggcgataaacgcctgtcgccgaaagagagcgaagtactgcgcctgttcgccgaaggtttcctggtaaccgagatcgccaaaaagcttaatcgcagcattaaaaccatcagcagccagaagaaatcggcgatgatgaagctgggcgtcgaaaacgacatcgccttgctgaactacctctcttccgtctcgctgagcgcgacggacaaagagtaatctcttcgccctctccgtctcgccccggcgagacggagctccccattattcccgccctttacgcacccgcgccgcatataccgtcagcgtttgcttcagtacgtcgagggtgaccggcttggacagacaactgtccatccccgattccagacagcgctgcttctcttccgccagggcattggccgttacgccaatcaccggcagcgtcaggccaagctgacgaatgcgctgcgtcaggcgataaccatccatattaggcatgttgacgtcgctgagcacgatatcgatgtgctgcttgctgaggacgttgagcgcgtcgatcccgtcgttcgcggtcacgcactggtagccgagcgaacccagctgatccgccagcaggcggcggttgatcgggtgatcgtcgaccacgaggatcatcatgtcgtcgttattgccggcctgcgcctccggggccatcagcgccgggctattttccgcactcgcgagcgcaacatggaaaatacgccccagcagcggcagcagttcgtggggagtcgtcacgctgtgcagccattcgccggcggaccgctcctgcggaataccgatatgacggcgacagaagatgaccatggcccttccctgccatccgctcagcgcctcatcgtcagtgagtaagacatcctcggcgtccggcgtttcaccggcatggcggcggaccgtcaggccgtggtagctgagcagcgaggtgacgaacatcgccagcgaagtgttatgaatcgccagccagcaggtcttgccagcgaaaccgtctctgctcaccggtgaggtattctgcacgccatacagaggaatacggatggtaaagcggctacccatccccggctcggtttcgacagcaatatcgccatccatcatgctgatcagtttttcacagatcgccaggccaaggccggtgccctgaaaattgcgctgcacgccggtccccacctggaagaaaggatcgaagaggcgcaatacctctttcgccgggatcccctctccagtgtcgcgaacgctaatctgcagataatcccccgcgcactggacgtgcaggacaatacagccggtatcggtgaactttatcgcattgctgagcagatttgagatcacctgctgcaggcgcatcgggtcgccggacatttgttccggaacgtccggctcgataaagcagtacaggcccagctgcttgcgcaccaccaacggcagatagttagcggagatatggttcatgacttcgcgcggagagaactcccgcggctcgatcttcaactgctcggactcgattttcgagaaatcaagaatatcgctgatgattttcagcagcaggctggaggagttgttcatcgccgtcacaaggcgatcgacgcctttcggcaacgctttggtctgcagcagatcgaggttaccgatgatgccatacagcggggtacgcagctcatggctaacggtcgccaggaacatcgatttcgactggctggcctgctccgccgcctgggccatctcctgcagcgactcctccattttcacgcgggcggaaacgtccaccagcacgcaaatggcgacgttttcattgcgatagcgtgaatgaacaaagctaatctgcaggttggtatggttgctggtcagcacgtcgacaaaattgacctgctggccgcagatgatctgcgtcagccgctggcggtcctcgtgggtcagcatgttcaggtagttgtgcgccagttcattactgagaatattggtcccgtcggcagtgcgcagaatacagatccctaccggggcagaagccacaattttgcggttgaactgctcgtgctcttccaggcgctgggcgtcattctccgcggggataaaaatgcgccgctcatacatccgcgccagcgcgaacagcatcgcgccgctgaggatattaagaacgatagcattgatgatcagcatacggatccgctccagcacctgatctaccgagacggaatagacgatgctcagggaggacggcgagaggctttttttcagcaccagctcgcggaaacccgaactgtagccaaaccacatccgctcctgcatccacttcgcttcgctctggattttaccttccgcaccggccagcgaaatcagcggctggccgttatcgtcaaagatcgtcacgctcatcggcaaactgcccggcgtaaagaagctttccatgcggatggtctgctccacgcctagcatcgcctgcaggcgattggccatatagaccggcgtcagggcgtaaaaatagcccaccccggggcgaacgccctggcttatccagaacaggttgttgccgcgctcattttgcggcgcgttgcgatattgctctatgcgctgatgcaggactttcagcgcctgatcgcgctcaatcggcacgtcccgcaggccaaagttggccatgcagaggttatcgctgccgatgagaaagatgcggttaaggtcgtaggcggcagtaaaattatcccgccagtagcgcataaaccatgccagcgactgcagcgaattacgccaggtggcgctcatcgcgctgcagtcggaatcggggtacaggggttcaaagttgggcaccgccatatcgccgttttgcccttgcgctaccgcgtcccctgccgacaagcgattaccggcgacatacttcagctctttcattacatccgcggtacgctggatatagcgctgggcctgatcggcgttgagattaagctcctgatggatttcggcttcccgctcgtgcagcgcgttgacgatataaaacacagagacaaacgcaataagcagccacagcaataccgccagcgctctgaacagataacgtgaaaccttcagggttgtatgaaaagaggcaagatatttcaatgtggcgatgctcggccgtcagggactcaacagaatgcggttaaggtagcggtaaaccggctttgccgcaatgttaatgcaaaaagggccgggaaaatacccggcccttccagaacatttacctcggacgattattcttcgtcttcggcgatgtcgtcatcggtatccgcttccggggcgatatcgtcatcgccttccgccgcgctaccatcgatggcatccagctcttcatcatccaccggctcagccacgcgctgcagacccaccacgttttcatcttccgcggtgcggatgaggatcacgccctgggtgttacggcccacgatgctcacttcggaaacgcgggtacgcaccagcgtcccggcgtcggtgatcatcatgatctgatcgcagtcatccacctgcacggcgccgaccacggaaccgttacgctcggtgactttgatcgaaataacgccctgggtggcacgcgacttggtcggatactccgccgccgcggtacgtttaccgtaaccgttttgcgtcaccgtcaggatcgcgccttcgccgcgtggaataatcagcgagacgacgctgtcgttttccgcaagcttaataccgcgtacgccggtggcggtacggcccatggcgcgaacggcgtcttccttgaagcgtacaaccttaccggccgcggagaacagcatcacttcatcctgaccagaggtcagatcgacgccgatcagctcatcgccttcgttcaggttgaccgcgatgataccggcggaacgcggacggctgaactcggtcagcgcggttttcttcacggtaccgctggcggtcgccataaagacgttgacgccctcttcgtactcgcggaccggcaggatggcggtgatgcgctcatcggcttccagcggcagcaggttgacgatcggtcgaccgcgcgcgccgcggctggcttccggcagctgatagaccttcatccagtacagacggccgcggcttgagaagcagaggatggtgtcatgggtgttagccaccagcaggcggtcgataaagtcttcttctttaatgcgcgctgccgatttgcctttaccgccacgacgctgtgcttcgtagtcggtcagcggctgatacttcacatacccctgatgcgacagggtgaccaccacatcttcctggttgatcagatcttcgatgttaatatcagcgctgttggcggtgatttcggtacgacgttcgtcgccgaactgatcgcggatcagctccagctcttcgcgaatcacttccatcagacggtcggcgctgccgagaatgtgcagcagctccgcgatctgctccagcagctctttatattcgtcgagcagtttttcatgctcaaggccggtcagtttctgcagacgcagatccagaatcgcctgagcctgctgctcggtcagatagtatttaccgtcgcgcacgccgaactctggctccagccattccggacgcgcggcgtcatccccggcgcgctccagcatcgccgcgacgttaccgagatcccacgcctgggcaaccagcgccgttttcgcttctgccggggtcggcgcgcgacggatcagttcgataatcgggtcgatattggccagcgcaacggccagcgcttcgaggatatgcgcccggtcgcgcgctttgcgcagttcgaaaatcgtacgacgggtcaccacttcacggcggtggcgtacaaacgcggcgataatgtccttcaggttcatgatcttcggctgaccatggtgcagagctaccatgttgatgccgaaggagacctgcagctgggtctgggaatagaggttgttaagcaccacttcccctaccgcatcgcgcttcacttcaatcacgatgcgcatcccgtctttatcagactcgtcacgcagcgcgctgatgccttccacgcgtttttctttgaccagctcggcgattttctcgatcaggcgcgctttgttcacctgatacggaatttcgtgcacgatgatggtttcgcggccggatttcgcgtccacttccacttccgcgcgcgcgcggatgtacactttaccgcgaccggtgcgataggcctcttcgatgccgcgacggccattgataatggcggcggtcgggaaatcagggccaggaatatgcgccatcagcccttcaatgctgatgtcttcatcgtcaacatacgccagacagccgttaatcacttccgtcaggttatgtggcggtatgttggtggccatccctacggcgatcccggaggcgccgttcaccagcaggttaggaattttggtcggcatgacgtccggaatacgctccgtaccgtcatagttgtcgacgaaatcgaccgtctctttttcaagatcggccatcagctcatgagcgattttcgccagacgaatttcggtataacgcatcgccgcggcggagtcgccgtcgatggaaccaaagttaccctggccgtccaccagcatgtaacgcagcgagaacggctgcgccatacgcacgatggtgccgtataccgcgatgtcgccgtgcgggtggtatttaccgattacgtcaccaacgacacgggctgattttttataggctttgttccagtcattgcccaatacgttcatggcgtaaagtacgcgacggtgtaccggcttcaggccatctcggacatccggcagcgcacggccaacaatgaccgacatcgcataatccagataagagttcttaagctcttcctcaatgttgaccggtgtaatttctctcgcaaggtcgctcatctaaccgctatccctctactgtatcccggattcaaaggtcgcaaattataacacagccgcgctaatagaggtaaagcaatacggtttattcatggcgcgctgctgatatactcgcaggtctgaacagaaaaggagtaaaagcgcccatgaatgccgaaaaaacgtcggtagcccctaacgtcgatcatgctgaaatcgccaaattcgaagccgtcgcctcgcgctggtgggatctggagggcgagttcaaaccgctccaccgcatcaacccgctgcggctgggctatattgccgaacgctccggcggcctgttcggtaaaaaagtcctcgatgtcggctgcggcggcggcatcctcgccgagagcatggcgcgcgaaggcgcgacggtcaccgggctggacatgggggccgaaccgctgcaggtcgccaggctgcacgccctggagagcggtattcaggtagactatgttcaggaaacagttgaggaacatgccgcgaagcatccccagcagtatgacgttgtgacctgcatggagatgctggagcacgtccccgacccgcagtcggtggtgcacgcctgcgcgcggttagtgaagcccggcggacaggtcttcttctccaccatcaaccgcaacggcaaggcctggctgatggcggtagtcggggcggaatatgtcatgaagatggtgcccaaaggcactcatgatgtgaagaagtttatcaagccggccgagctgctgggctgggtagatcagactactctgaaagagcagcatatcatcggtctgcattacaatccgctgaccaataccttcaagttagcgccgggggttgatgttaactatatgttgcataccaccgccaaacaggactgaggtcagcacctccgcttatgatgattgcgcggcatcaagccgcgtgattatttcttccgatgaagaaatcagcactcgatcaaattttcatttttttttctgttttattgacttcttctccaggccttatgcgacgtggacttgcggattattacccttccgcaacctcaatttaacgtcaaaatcaacccttgtactcaaaagattccttactaaaatactcaccatatagcgtttcttttatcgacaaccccctacatatagtatttatccacagagttagtcacaacggccttctgtggataaacgggggatattttctttcacggacaggtaaaatccacatgaatcagagtctgctggtgacaaagcgcgacgggaccaccgagcgcatcaatctcgacaaaatccatcgcgtactggattgggcggcagaaggactgaataacgtttcgatttcccaggtagagctgcgctcccatatccagttctatgacggcatcaaaaccgcggacatccacgaaaccattattaaagccgctgcggatctgatctcccgcgacgcaccggattaccagtacctcgccgcgcgtctggcgattttccatttgcgtaaaaaagccttcggtcagtttgagccgccggcgctctacgatcacgtggtgaagatggttgagaaaggtaaatacgatcatcatctgctggaagactacacggaagaagagttccagcagatggacggtttcctcgatcactggcgcgacatgaacttctcctacgcagccgttaaacagctggaaggcaagtatctggtacaaaaccgcgtcaccggcgaaatttatgagagcgcgcagttcctctatattctggtcgccgcttgcctgttctcgaactatccgcgcgaaacgcgtctggactatatcaagcgtttctacgacgcggtgtccacctttaaaatctcgctgccgacgccgatcatgtccggcgtgcgtaccccaacccgtcagttcagctcctgcgtgctgatcgagtgcggcgacagcctggattccatcaacgccacctccagcgcgattgtgaaatacgtttcccagcgcgccggcatcggcatcaacgccgggcgcattcgcgcgctgggcagcccgatccgcggcggcgaagccttccacaccggctgcattccgttctacaagcatttccagaccgcggtgaaatcctgctcgcagggcggcgtgcgcggcggcgcggcaaccctcttctacccaatgtggcatctggaagtggaaagcctgctggtgctgaaaaacaaccgtggtaccgacgccaaccgcgttcgtcacatggactacggggtacagatcaacaagctgatgtacacccgtctgctgaagggcggcgatattaccctgttcagcccttccgacgtcccgggcctgtatgacgccttcttcgccgatcaggacgagtttgagcgcctgtacacccagtacgagcaggacgatagcattcgtaagcagcgtattaaagccgttgagctgttctcgctgatgatgcaggagcgcgcctctaccggccgcatctatatccagaacgtcgaccactgcaacacccacagcccgttcgatccggtagtcgccccggtgcgtcagtctaacctgtgcctggagattgctctgccgaccaaaccgctggaagatgtcaacgacgaaaacggcgaaatcgcgctgtgcaccctgtcggccttcaacctcggggctatcgacagcctcgacgagctggaagagctggcggtgctggcggtgcgtgctctggatgcgctgctcgactatcaggattaccccatcccggcggctaaacgcggtgcgatggggcgtcgtacgctgggtatcggcgtgatcaacttcgcttactatctggcgaagcatggcaaacgctactccgacggcagcgccaacaacctgacgcacaaaacgttcgaagcgattcagttctatctgctgaaggcctctaacgagctggctatcgagcaaggcgcctgcccgtggttcaacgaaaccacctatgcgcagggcatcctgccgatcgatacctataagaaagatctggacggcatcgtcagcgaacccctgcactacgactgggaagcattgcgcgaatccattaaaacccacggcctgcgcaactccacgctctccgcgctgatgccgtccgagacctcgtcgcagatctccaacgccaccaacggcattgagccgccgcgcggccacgtgagtatcaaagcgtccaaggacggtatcctgcgccaggtggtgccggattacgaaaacctgcagaacgcctacgagctgctgtgggagatgccgaacaacgacggttatctgcagctggtgggtatcatgcagaagtttatcgaccagtcgatctctgccaacactaactacgatccgacgcgcttcccgtccggaaaagtgccgatgcagcagttgctcaaagacctgctcaacgcctataaattcggcgtcaaaacgctgtactatcacaatacccgtgatggcgctgaagacgctcaggatgacctggccccgtccattcaggacgacggctgcgaaagcggcgcttgtaagatctaaggtatttttgccgggtaacgctacgcttacccggcctacgtttgtgtaggcccggccaacccattcctgccgggcaatacagttcaacaggacttacttcaatggcatacaccactttttcacagacgaaaaacgatcagctgctggaacctatgttttttggccagccggttaacgtggcccgctacgatcagcaaaaatacgacatctttgaaaagctgattgaaaagcagctctccttcttctggcgcccggaagaggttgacgtttcccgcgatcgcatcgactaccaggcgctaccggaacacgaaaaacatattttcatcagcaacctgaagtaccagacgctgctcgactccatccagggccgtagcccgaatgtggcgttgctgccgctgatctccatcccggagctggagacctgggtagaaacctgggccttctccgaaaccattcactcgcgttcgtacactcacatcatccgcaacatcgtcaacgacccggcgaccgtgttcgacgacatcgtcaccaacgagcagatccagaaacgtgcggaaggcatctctcactattacgattcgctgatcgagatgaccagctactggcatctgctgggcgaaggcacccacaccgtcaacggcaaaaccgtgaccgtgaatctgcgcgagctgaaaaagaaactctatctgtgcctgatgagcgttaatgccctggaagcgatccgcttctacgtcagcttcgcctgctccttcgcctttgccgaacgcaaactgatggaaggcaacgccaaaattatccgcctgatcgcccgcgatgaagcgctgcacctgaccggcacccagcatatgctgaacctgctgcgctccggcagcgacgatccggaaatggcggaaatcgccgaagagtgcaagcaggagtgctatgacctgttcgtgctggcggcgcagcaggagaaagagtgggcggactacctgttccgcgacggctcgatgatcggcctgaataaagatattctctgccagtacgtcgagtacatcaccaatatccgcatgcaggcggtgggcctcgatctgccgttccagacccgctccaacccgatcccatggatcaacacctggctggtctccgacaacgttcaggtggcgccgcaggaagtggaagtcagttcttatctcgtcggccagatcgattctgaagtcgatgccgacgatctgagtaacttccagctgtaatgaagcggatcttcctgaaaatctctgacactcgccttgagtgtcaggatgaacacccttccctgctggcggcgctggagtcgcataatatcgacgtcgaatatcagtgccgcgaaggctactgcggctcctgccgcacgcgcctggtctccggccaggttgactggctgaccgagccgctggcctttatccagccaggagaaattttgccctgctgctgccgggcgaaaggcgatattgagatcgagatgtagtcttgtcaggtggcgctacgcttacctgacctactgttccaggaccggccgtttacgcactgccgccctgggctgctgaaactgccggtgttgacggcctcaaaatcgctgagacgttcccggaaggccggggcagcccgcatggatgcgggctgagggccgtgttttgcatggacgctacctcggcccgacccgaagcctgcagggataagtcgaagggaccgcgcagcggcgattttgctggccggagcccgggggtacagggggaggcggcgactggcctccccctgtgcgctccctgcgctatgaaaggcataacgcagaagaaatatcgggagcgcaatcttccaggaaataacatagaacaaacgttattcccgggtcgaaatcgttgcacgccgagaacagtgtcaacaaaaccgcagttcgtacgccgggtaaggcgtagccgccacccggctttttagcgtttcgcgtccaggaactgcaccgctttatccgggaaatcggtaaataagccgtcgacgcccgcctggttatacagtacgtcatagagctgattaacgttagtcgcgtactccggcaactgatccgcgcgcacggtgtacggatgcacctgcagatggctggcatgcgcctctttcaccatcgccgtcagcttcaccgcccccggcttcgagccttccgctaccagcatatggtaatccgggccgatgccgtccgcgtactgcgcaatctgcgccatcgcccctggcttgaacatccagtcatagctgtagttcacccacttaccatcggcctgtttctgctgggtttcattccagtcggtataggcgatgagctgcaccagattgagatccatccccatcttcggctccagctcatttttaatgcgtttgagctcgttggcgtcaaagcactgcagataaaccttatcctgcttgctggtatagccatattccttcagcaccttcaatgtgctggcggcaatatctttgccttcctggtggtggaaccacggcgctttgatttccgggtagataccgatgtttttgccggtggaatgattcagcccctggacaaactcaatctcctcttcaaaggtatgaatacggaaatcggatttgcccatcgggaatcgcccgggataggtttgcacgttcttaccatttttcggctcaaaaccttcggtgaacttcagcgacttaatctcgtccagggtaaagtcgatggcgtagaaacggccatctttacgcgcccgctgcgggaaacgctgcgcaacgtcagtcacccgatcgagatagtggtcgtgtaacaccaccagccggtcgtctttggtcatcaccaggtcttgctcaaggtaatccgccccctgagcgtaagccatcgctttcgccggcagggtatgttccggcagatacccgctggcgccgcggtgggcgatgaccattttatcagccgctgtcgcgctgaagcacagcgccgaactggacagaatcattccgctcatcagcgcggtaagtttcattttcatcgccgctccttaggcttgtttcagctgttggtgatggcgacgttcaccgagcatcacgataaccagcaggataaccgccagcacgctgccgccgatcatcaccataaagccgccgtcccagccgaagaaatcgacggtgtagccgacgatagcgctcgcggccacggaaccgccaagatagccgaacaggccggtgaagcccgcggcggtcccggcggcttttttcggcgccagctcgagggcatgcagaccaatcagcatcaccgggccgtagatcaggaagccaatgatgatcatacaggccatatcgacgcccggattacccggcgggttcagccagtaaacgacagtggcgatggtcaccagggtcataaagaacacgccggtggcgccgcggttgcctttaaacactttgtccgacatccagccgcacagcagcgtgcccgggatccccgcgtactcgtacaggaaataggcccaggaggatttatccagcgcgaagtgtttaacttctttcaggtaggtcggcgaccagtcgagaatgccgtagcgcagcagataaacgaagacgttagcgatagcgatgtaccacagcagcttgttcggcagaatgtattgcataaagatctgcttcgccgtcagctcttcttcgtgcttttcgctgtaatcgtccgggtagtcgtttttatattcttcaatcggcggcagaccgcaggactgcggggtgtcgcgcatcatcgcaaaggcgaaaatcgccagcagaatggcgccgaatgccggcatatacagcgccgcgtgccagtcgttaaaccacgccatccctaacaggaacagcagcggcggaatgccgccgccgacgttatgcgcgcagttccacaccgagacaatcccaccgcgctctttctgcgaccaccagtgcaccatggtccggccgcacggcggccagcccatcccctggaaccagccgcagaggaacagcagcacgaacattatcatgatgctggacgtcgcccacggcacgaagcccatcaccagcatcaccagcgcggctaggatcaagccagccggcaggaaaatgcgcggattcgagcggtcagagaccgatcccatgatgaatttcgaaaatccataggcgatggagataccggaaagggcgaagccgaggtcgccacgagagaacccctgctcgataagataaggcatcgccagggcaaagttcttacgaaccaaatagtaggcggcataaccaaaaaagatgccaataaaaatctgccagcgtaatcggcgatatagcgggtcaatctccgctgctggcaaacgcgctttatgcgcggcgggtttaaaaatacttaacatatcagcctccgtggcccttgctgttttctactgacgtcacgacaaaatcccagattaatcaccaacttcaaatatggtcgcgatggtaggcaatacgtagagttgatactgtgaaacatcgcacaatttgttacagaaatatgacaaaacgttccaatgtgagcacgaaatcacataacacgctcaaataacgcgcgaatatgctcgaaatcaaacaataaccttactatttgtggctaaatggcgttaaacgaaagcagaggagctgaagatgacgggacgtcttgatagcgaggtcattatcatcggcggcggagcaaccggcgccggtatcgcccgcgactgcgcccggcgcggattacgaacgctgctcattgagcgccatgatatcgccaccggggcgaccggccggaatcatggactgctgcacagcggcgcccgctacgcggtgaccgacaacgaatccgcccgcgaatgcatcagtgagaaccgcattctgcgccgcatcgcccgccactgtattgaaccgaccaatgggctgtttatcaccctgcctgaagatgacctggcatggcagcaaacctttatcgacgcctgtcagcaggctggcatagaggccacgccgctctcgccgcaggaagcgctgcgccgggagcccgccgtcaacccgacgctgctgggcgcggtgcaggtcccggacggtaccatcgacccgtttcgcctcaccgcggccaatatgctcgacgcccgcgaacacggcgcgcagatccttaccggctgcgaagtaacaggcctgctgcgccggggcgatcgcgtctgcggcgtccaggtatacgaccgccaacttcaccaggcccgcactctgtacgccgggatggtggttaacgccgccgggatctgggggcagcgtattgcggaatatgccgacctgcgcatcaccatgttcccggcgaagggatcgctgctgatcctcgatcatcggattaacaacctggtgatcaaccgctgccgtaagccggccgacgccgatattctggtgcccggcgataccatctcgctgatcggcactacctcaatgcatattccttatgacgaaattgacgacaaccgggtaacagcggcggaggtcgataccctgctccgcgaaggggaaaagctggcgccggtcatgggccgcacccggatcctccgcgcctactccggcgtccgcccgctggtggccagcgataacgatcccagcgggcgcagcgtcagccgcggcatcgtcctgctcgaccatgcccagcgtgacggtatggaaggcttcattaccatcaccggcggcaagctgatgacctatcgcctgatggccgagtgggccaccgacgccgtctgtcgtaagctgggaaacaccaccccctgtaccacggccgaagccccgctgcccggttcacaggagccaacggaaagtaccctgcaaaagattatctccctccccaccccgctgcgcggctcggccgtctaccgtcacggcgatcgcaccccgtcctggcttggcgacagccgccagcaccgtagcctggtctgcgaatgtgaagccgtcactgccggtgaagtgaaatacgcggtggaaaacctggcggtcaacaccctgctcgacctgcgccgccgcacccggattggcatggggacctgtcagggggaactctgcgcctgccgcgctgccggcctgctgcagcgctttaacgtcaccacgcccgcgcagtcgttaacccagctctcggaatttctcaatgaacgctggaagggcgtgcagcccatcgcctggggcgatgcgctgcgcgaaagcgaattcacccgctgggtctacctcggcctgtgcggattgccacaggagcaccgggatgaagtttgattgcgcgattatcggcggtgggctcgccggcctgctgtgcgggctggccctgaatcagcacggcctgcgcagcgtcatcatcagccgcgggcagagcgcgctgcatttttcctccgcgtcgttagacctgctctcggcgctgcccaacggcgatcacgtcactgacgtcgcacaaggtctgcagcaactcgctgaacagcttcctgaacacccttattcccggctcggcgccgaggcggtactcgaatacgctacgcagaccgaagccctgctggccgcctgcggcgcggtgatgcagggcgatgcgcgccggccgcaccggcgggtaacgccgctggggacgttgcgcccggcatggctgtcgccccttgaggtgcctgtcgagcccctgccgtcgcagggcgcctgtctggtggggatcagcggctttgctgattttcagccgcatctcgccgccgccgcgctcggtcaacacggagttaccgccgcggcggtggaaatcgagttaccgctgctggatgtgctgcgtgataacccgaccgagtttcgcgccgccaatatcgcccgcgtcctggatgatgagaatatgtggccggccctgcatgcagcgctgctaccgctggcgcagcagtatgacctgctgatcatgcccgcctgttttggcctcgccgacgatcgcctgtaccactggctgcaggcgcgtctaccctgcccgctgcgtctgctgccgacgctgccgccctcggttcccgggatgcgtttgcattctcagctgcaacgccagttcattcgcgagggcggcgcctggctcgcaggcgatgaggtggtgaaaatcagccatcgacagaacgccgtcgaggcggtctggacgcgaaatcacggcgatattgcgctgcgtccgcgctttaccgtgctggccagcggcagctttttcagcaacggtcttgtcgccactcgcgatagcgtgcgcgagccgatcctcggcctcgaccttcaccagactctgccacgggaaagctggtaccagcgcgatttcttcgcctcacaaccgtggcagcgcttcggcgtgaaaaccgatgccctgctgcgccccctgctgggcgggcagccgttccataatctgttcgccatcggctcattgctcggcgggttcgatgccattcagctcggctgtggcggcggcgtctgcgccgttaccgcgctgcacgccgccagacagatccacgcccttgccggaggccggccatgaacgatacccgttttgaaagctgcattaagtgcacggtctgtaccaccacctgcccggtaagtcgggtcaatccgcgctatcccggcccgaaacaagcggggccggacggcgaacgcctgcgtctgaaggatggcgcgctgtacgacgaggcgctgaagtactgcattaactgcaagcgctgcgaggtcgcctgcccgtcggatgtgaaaattggcgatatcattcaacgcgcccgggcacagtacggccagcaaaagccgaccctgcgcgacgccatcctcagccataccgacctgatgggtaccctttccaccccctttgcccccctggtcaacgccgccaccggcttaaaaccggtgcgccgtctgctcgacgcgacgctcaacatcgatcaccggcgtacgctgccgaaatatggtttcggcaccttccgccgcgcttaccgccagctcgccgcccgtcagaagcagtacagcgaacaggtggctttctttcatggctgctacgtcaactataaccatccacagttgggtaaagatctgattcgcgtcgtcaacgcgctgggtaccggggtgcagttgttatcaaaagaaaaatgctgcggcgtaccgctgatcgccaacggttttttcgacaaggcgcgtaagcaggcgcagagcaacgtcgccgcgatgcgggaaaacacgctaccgatcattgccacctcctcgacctgcgcctttacgctacgtgatgaatacccccatctcctcgatgtcgataacagcgatcttcgcgatcgcgtcgagcttgccacccgctggatctggaaacagctggctgccggcaggacgctaccgctgcgcccgctgccgctgaaggtggtctatcacaccccgtgtcatatggaaaagatgggctggtcgctgtataccctcgagctgctgcggctgatccccggcctgcagctggaggtgctggattcacagtgctgcggcatcgcaggcacctacgggtttaaaactgagaattacgcggtatcccaggctatcggcgccccgctgttccgtcagattgaggagagcggggccgacctcgtcgtcaccgactgcgagacctgcaaatggcagattgagatgtccaccagcaaacgctgcgagcatccgctgacggtgctggcgcaggcgctcgtctgagcccagcgccagcctgtgccgtcaatagctcgttttctcttgcggctgggcgctggcagatttaaacatcgccagccggcggtccagcgcctgggtatacagcatggtatccaccccgacggcgacaaagttggccccccaggcaagacatttttccgccatcgccgggtcgaccgccagaaatccggccgctttccccgccgcgcgaatgcgccggatgctctgctcgatcacccgctgcacgtcagggtgaccggcatcgtccgggtagcccagcgaggcggagagatccgccggaccgatgaacaccccgtcaatgccgtccacctcgagaatagcgtccaggttctccagcgcggttcggctctcgacctgaatcagcagacagagttcgtcattcgcctccgccatataattctccacccttccccagcgcgccgctctcgccacgccggcgccaacgccgcggctcccgatggggggataacgggtcgctgagaccacctcccgagcctgctcggcggtatcgaccatcggcaccagcaaggttctggcgccaatatccagcacctgttttatcaggctgcggttgccctcgaccgggcgaatgaccggctggctggcatagggggcaatcgcctgcagctgatgataaagatcctgaatggtgttcggggcatgctcgccgtcgatcagcagccagtcgtatcccgacgtcgcagcgatctccgccatgtaggatgaggtggagctcagccacaggccgatttgcgtctcaccgcgtaataatccccgtttgaaggggttagataacagtgcgttcatagcgattcctttattcaatgctgtacgctgccgcgctggggtaccgcgcgggtaaggctcaatgaaaagataatgaccaccccgacaatggcgacgccggccagggttaacagtccggcggcgctgctggcgaacaacgtttcggcctgcacgcgcacgatcggcgccagaaaaccaccgatggcgccaaacaggttaacaaagccaatccctgcggccagcgccgtgccggacagcagctgcgtcggcatcgtccagaagaccggctgcacggcgatcaccccgaccgccgccacgcacagcgcgatgatagccagcaccggcgccaccagtccggacactgcaatcccgaccgccgccgccagcagcgtcagggcggcaatattgcgtcgctcgccggtgcgatcggagtagcgagggataagccaggtgccaaacagcgccgccacccacgggatggccgtcaccaccgaggcaacgaagccgactttggtgcccagcagcgcagcaacctgggtgggcaggaagaaaatcagaccatagaccgccacctgaatggtcagataaatcagcgccagctgccagacccgcccgttacgcagcgcatcggacaggcgcgaggcaatctttttctcctcctcgcgcgccagctcgcttatcagcgcctgtttctccgctgcgctcaggaagcgggcatgctgcggcgaatcgtccagccagaagaaggtgaacgctcccgcggcgacggcgagcaggccttcaatgacaaacatccagaaccagccgggatggcccataaatccatgcatctccagcagcgcaccggataaaggcgatcccagcgtcagggccagcggcgcgcccatataaaacagccccataatgctggcgcggttttgctggggaaaccactgtgaagtgaggtagatcattccgggaaagaagcccgcctccgccgcgcccagcagggtacgtaccagcaggaatttcgcttccgtatccgcccacgccatcgccgccgacagcacgccccacagcagcgtggtgcagccgatccatcgcctggcgccaaatttgcgcatcagcagattggccggcaccccgaggaaggcatagaccacaaagaagataccggcccccagcgcgtaggcctcattgctgagtccggtatccagctggtaggtctctttggcgaaaccgatattagaacggtcaagaaacgccagcacgtacagcgccagcataaaggggattaagcgggcgcggtttttcttcaccacgctctccagcagagtgttgctcatcataatatcctcaggcgcgggccgccgggcggcctgacgcaatcagtgttgataaggacgcttcaggttgcagtcgcgattgagctcgacgccaaagccgggtttatccaggaccgatttatgaatgcgccctctctccggcaccggctcgccgagcaggatcgggtcgaactgcgggcgcagcgtggcgcagtccggactggtcatcagaaactcactgaacggcgtgttggtgaaggtgatcaccgcatgatgtgagtaaaccgacgagccgtggggcactaccagctgcccgcgcgctttggcgatggccgcgatctccaccagggtggttaagccgccgcaccagccgacgtcgggctgcataatatcgatgccggtttccgacagggtgcggaaggactgcagcgtgccgtggtgctcgccgctggtcaccatcatcccggcaggcgcctggcgcttcagctcgcgatagccttcatactgctgcggcggcaggcactcttcgatccacttgaggttataaggggcgcaggcatgggcaagtttggtggcatagttaacgtcctggctcatccagcagtccagcattaaccagaaatccgggccgcatttttcgcgcatatccgccaccatggcgacgtctttgcggatcccggcgtcgccatcgtgcggcccccagtgggtaggcattttgccgccgataaagcccatctcctgcgccaggtccggacgtgcgccggtggcatagaactggatttcgtcgcgcaccgccccacccaacagtttgtagaccggcaggccaaccactttcccgaacaggtcccacagcgccaggtcgacacaggagatggtattcatcaccaggccgccggatcccgcgtagtaaagggtggcgttaagcatctggtcatggatcagtttgatatcgctgacgcatttgccttcgataaagcggttgagatgtttttcgacgataaagcagcccatctccccggccgtcgacaccgcaaagccggtctgtccgttgtcggcttccacttccacaatcagcgtccccagcacgttgatgccaaacgactgccgggactgctcatactgtttatatttgctcatcggggtggcgatatgatcgtcaatccagtggttagccccctggtcatggtaatcgccgccgccggcgccctgctctgctgtggcgccgccgatgaaccaggcgcggacgtgtttaattttcggtagggtcatgatgttctccttatgatgaggcgagttgttcgaaggggcttttccaccccagcagacgtgaaatatctttcgcgcaggcaatcgccttaccagccaggtaatcgcgattgtcttcattgatttgcagacgggtacccaccaccgagatggcggcggtcaggtcgttattggcgttaaataccggggcagccacgcagcgcacatccggatagtcctcgccattatcaaagctccagccccgggcgcggatccgccccagctcctcccgcagctgttgagcatcggtgatggtcgttggcgtggcccgctcccactgtaggtcttcgataatcgacgcctgaacgctggcgggctgccaggccagcaaacatttgccgatcccggagcggtaaagagacaggctcttaccctcatgcgagcgcacgctgatggtggcgggagactcaattttcagaatgtagtaggcgttaccctgatcgataatgcccaagtgacaaagcaggccgcactcatccatcagccgggtgaggcgcggccgcgccagctcgcgcaggtccattttgctcagcgcctgcccggccagctccaccagcttggtccacaggcagtagttatcctgattatccatactgatgaagcgctgctttttcagctcgcccagcagcagatacaccgtgcttttcgggatccccagctccgctattatcgtcgccgcgctgcaggggccgatgcggccaattaaattgaggatctcaatcgcgcgggtcagcgccgggactttcgttgattccaacatactggactccaatcctgaatactggaatcagtgttgcgattgtccgggcggtaaagtgtgagcgacatcgcggggcaatcgttttcccgtatactggaccgttcgcagcagaaaattgcgacttaacgcacagaattttttcagaggagtacaacaggttggacgaccggcgccccgaggatacggtgcgccggggggaatgacttacagcgagagggaatccaccacgttaatccagccatgttcgctggccagcggttgaccattcagccagcgacgcagcatgtttaacgccatcatagcgcagacttcctggcgtaccgccaggctgtggcgggtggcgctaaacttcacccgcagcgcgaaggtgccgtccggggtggccagggccacgttaagatgatcgttttcctgaccgctcaccgccagagccaggccggcaaaatggtttatgcgccgctcggccgcccagcgggccgcctgcgccagcgtctcctcctgcgccggaacgacttcgctggccagcagcggcgcgccggcgcgggacagctggagcgccagcaggccgctggtaaactgctcgctgagcgtcaggctcagctgccgctcctgcagacagcgggcgatttgcgcgggtaacccttccgtaccttcgaaaatcaggctgtcgccagccaccttacgcacctccggccacagggccagcatggcgtcgcgctggttggccggtccggttagcttgagttcaatgatcggcatcgacgagcggtaacccatcaccacgcccggaggcagcgtcagcggattaagactttgcgccagctcgctctccgagcggccaaaggtggtcaaacgcaggcataccggcgggtccggcagcgtaaagcgctggcgcaggcgcggtaaaatttcctgctcgaccatcaccttaaattcagaggggaccccgggagtgaaaaacatcaggcagcggttgagctggatggcaaagccacaggccgtaccgaccgggttgttgatcatctcggcgctggccgggatttccgcctgcttacggttgctttccgccatcggcctgccgcgctcggcaaaaaagcgggtcatggtttccagccactccggatgcaaaataagcccttcgcctttcgcagtggcggcggccagcgcgctcaggtcgtcgctggttgggccgaggccgccgttgacgatcagcacatccgcctgttcgctgcgttcgcgcagaatcgccaccagcgcatcgagatcgtcgccaacggtattgcggcgcgttaacggtaaaccctgattaaaaaagaaatccgccagccatgccgcattagtatcaataatttgaccatgcaacacttcatcgccggtggacagcatttccacattcaacattgctcactccttgcctgccaggtgagaaatactataacgcaaagcgggatgctgacgaggaggaaaatctggcgcagcaagaagatgccgcgccggaagagattagaagctggcgctggcgccgatgtatgggccgtcggcgatggtgttatcgcggttgccatctttgcccgccaggttcaggtaacggtagccggcctggatgctaagcggacgcataatggtccagctggcgccgacgttggcttcctggtagctatcaatgccgctggagagcgaatccggagagtagtaataatcgccgtacaggcggaagctgtcgccgattttccactgcaggccgccgccgaccgcggccgcataaccttcatcgccctgtttcggattggtgtaaatacctttaccacccacggtcgcgaggaacggccccagcggaatattgagtcccaggcctaaacccgcggcgtcgccgtcgttatcgctgtgcagccagttacccgaaacggccaggccggtggactcggtgccgaagccgacgccaaggttggtgtaatgctcgccggcttcaccggtaacgctaatcgcatgggccgccgaagaaaccatcatcacgcccgccagcgccataaaaatgctttttttcattatttactctatccagaaaattaaaatcaaagaagtcccgaaaaaacctgaaaattctactgcgcacccatcaggaatcaatgacctggcgaaatgaattttcacaagagtgtaaccagttgcgtatttttacggcatcgagcgttgccagaaccacgaacagcctattcaacgccagtaatattcatgtttattatgattaacgctgacacattgacgaaaacagagagctggcgccgcacgatcggcgcggcgcgggtggataagggaataattaatgctgcagccgggccagacattccggggcgaggccggtcagtttcgccaccagcgacaggtcgagtccgttagcaagcatcgcccgggcgatacgctccgcggtctgctgctcaccttgctcgataccttgttcgataccttgctgtagaccttgttcaagaccttgctttaatccttgctgatggccgcgttgttccagaaactgggcaatattcattagcgtctccttatgcggccgccggggaacgttttgcgcaagatggcgcaaaaaagcaaccggatcggcggcgtttcctgcctgtaataaatagtgcaacagcgtcttaagctgcctgcggctagtgtatcccagcgccaggagcctgaccagttgctcatgcaggtccatcaaatcccgctggcgaatatgcttctgcagcagctccagcatcgccacgcgccggtggcgcatgatttcatcgtccggggtgctagtgatatcaattaagggaaaatcttcaccatagacccgccgcgcgatgtccggatcggcaaagcctgccagccagcacatcgggtaaggccagggagaaacgcgaccatgataaaacagcagcgggatcaccagcggcagctgcgtatgccctttatccagatgacgctgcatcgcggctatcgcatagcgcatcaggcgaaatgccatatggcggtccgccgagctttggtgctctatcaacagatagatatagccctcccccgcctgcgtttgcagcgagtaaaggatatcggaatgactcgcccgcagttcgtcgtcgataaagctcccggactccagccgcagcgtgttcaggttacataacgcgcgcagcggtgcgggaaggtgaatgtccagaaaatccctggccgtcgcccgatgcgacagcaggtgtttaaatacagcatcgtggggggaattcgtcgccctttccatggcggtgctccatacaatcattttcgcttaacgtagcactcaacaagacctgaactgtatttcgcttgcagtttaccgaggcggctcgcaaactatttcaccagcataccgccccatccctctgcaggagaaaacccatgcgccacaggacgattgtttgcccgctgatcgagaataaaggccattatctgctttgcaaaatggccgccgaccgagggggttttcccgggcaatgggccttatccggcggcgtggagccaggggaacgtattgaagaggcgctgcggcgggaaatacgcgaagagctcggcgaaaaactcatccttacccatatcgcgccatggtgctttcgcgacgatacccgcgtcaaaacctaccccgacgggcatcaggaaacgatctacatgatctatctcatcttcaactgcgtgagcgccaatcgcgatgtgacgatcaacgaggagtttgacgattacgcctgggtcaaagccgaagatctcaaaaactacgatcttaatgccgccacccgcgttactctcagcctgaaagggctactttagtccagcataccgcgttcaacccacccggcgttatgccgcgggataatgcgggtggctacgatacggtcgcatgcgtctgctgcctgacccactcgcacagcgcccggcgcgaaatcttaatcccgccgttttttaacgtttccggcaaccgcagccaacgcaccggctgctgaaaacgcgctaaccgctcagcgctccatgccgccagcgcgctcaactcgcagccgtcatcgcattccaccaccgctaccgggcgctggccgtattccgcatcatccagcggcacgataaacacctgctgtacctgtggatgggcgagtatcacacgctcgacctcttccggttgaataccttctccaccgctaaaaaagaggttatccagtcgcccaacaaccgtcagccgaccgttatgcaatgctccgcgatcgcgcgtcgcaaaccagccttcattgttggttaatgacaacaattgaccatcccgccagtagcctgcggccatactcgacgcccgcagccagatctcgccggcgacaattttcacctctcgccccggcagcgcttcgccaacatccgcagcgccgtcggcctctttggcacacacggtggaggcgaattcggtgaggccatagccgcagaagctgcgtatgccctgctttcgcgcccgttcagtcaattcgaccgggatcgacgcgccgccgagcagcaccgccttgagggaaaccgcagcatcatcattcagcaggcgccatagctgagtcggcaccagcgaagcatgggtacagccgtgcagcatctgcgccagcggctgtttgtcacgtaccgtgagtcgcgcgccggccagcagccagcgccagacgatcccctgaccggagacatggaacaacggcagcgacagcagccagtcatctcctgcggcaaacggcatcagcgccagcacgccagccgcgctggccagatgggcgttggcgctatgtaccgccgctttcggcaggccggttgaaccggaggtcaacgtcatcgacaccaaccgatcgccatgccaacaaacggcacaagcgccttctgccgcctgcagagttaacgccggtaaattccccggcagcgtatcaccgttaagcaccagttgatgctgtacggttaacgcaggcagcagttcctgcagcaacaccgctggcagctgcggattcagcggcagcacccgcgccccgcactgtagcagcgccagccatgccagcagagtttccggctggttataggcccggagcgccacgccctgcccttccattacgccctgcgcggcaaaaccagacgccagcgcgtcaacccgcgcgcatagctcccgccaggtcagcggctggttattcagacgtaaggcgagggcctctccgcgccgctgacgccaatgccgccagggccagtcgttaaaggtcacagcagcggctccagcgcatcaatgttgagcaccggcagcacactttcgggccacggccgtaccagctgggcgcccatcagcgacagcgtatccaacccaggaatagtctgcggcgtcagccaggcggcaatccgcgccagctgggtcaagccgagactggactcgatcgacgagctgatcactacgctcaaccccagcgcatgcgccgcggcgacctgttgctgcaccttctgcaaactgccggttagcgtcggtttgatcaccaccgcacgtacccccggctcggcgacaaagcggaaatccgcctcgcgcaggctttcatcccaggcgatagcgatccctgtctcgcggctaaaggcccgagaatcctcccgcgttttgcaaggttcttcaagaaaagcaatgcgctggcggtacgccggattaacgtatttggcgaactgttgcgctttgagcggcgtccaggcgcggttggcatcgagccgcagctgcaggtcggggatcgcctccagcagcagattcaccaccatgccgtcgcggaccgcctcccagaggccaactttgaccttagcgaccttctcgccgggcatcgccgccagtctggcgaatagctcatccggatcgccggagcagagcggcgccgcgcgataatccgcggcctgcggtagtccgccgctaagctccgcctgcgcgcagctgatgccaaacgcgacggagggctgcgtgggaagcggcggctcggcgccgtcgcgccaggcctgtgcccacgctaacagcgccatttgcgcctcttccagcgtctcgacactgaatcccggcaggggagaaatttcgccccagccttcgcgttcaccctcctgcaggcggatgaacagcccgtcgcgggtttttaaccgccgctcgcgcagcaccacgcccgcgtccatcggtatctgccagcggtaaacctgcgaaacgcgcattatggattccgtttaaatttgctgaagtccggctgacgtttctggttgaaggcattgcggccttcctgcccctcttccgtcatatagaacagcatggtggcgttgcccgccagctcctgcagaccagcctggccgtcgcagtcggcgttcagcgccgctttcaggcagcgcaaggccatcgggctgttctgcagcatttcacgacaccagcgcacggtctctttttccagatccgccagcggtaccacggtattcaccagccccatgtccagcgcctgctgagcgtcatactggcggcacaggaaccagatttcgcgcgcttttttctgcccgacgatccgcgccatataggaggcgccccagccgccgtcgaaagagccgacttttggcccggtctggccgaagatggcgttttccgccgcgatagtcagatcgcacatcatatgcagcacgtgaccgccgccgatagagtagccggccaccatcgccaccaccggtttcgggcaggtgcggatctgacgctggaagtcgagcacgttaagatgatgaacgccggagtcgtcctgatagccgccgtagtcgccgcggactttctggtcgccgccggcgcagaaggctttctcaccttcaccggtcagcacgatgacgccgatattgtcgtcataccgggcatccgccagcgcctggatcatctctttgacggtcagcgggcggaaggcgttgcgcacctgcggacgattaatggtgattttggcaatcccgtcagtcgatttgtgatagcgaatatcggtatagccttcggagcaatcgtgccattcaacgggggcgtagagcattgcttcatcaagagagatcatagaatgtccttcagttaacttgccagaatctgcgccagacaggcaatcaccgccgccgggttgtcccggtgcgcgttgtgtccggcatggtgaataagatggagatccgccgcgagcgtctgcgcgatggcgcgaaacttcgcgtcgtgctcgccgcacaggtagtgaaaaggaaaatcgcgcgcctgcagagacgcgagcagatcggcctgcgcggcaagggaggttgcctgcagcatcgccgccagcgtcgcgccgttgttccggctgcgtaaggcgaccaatgactcacgctgcgcggcattcagcgaagcgaagaccggctgctgataccagtcggcaaagacctgctcaagcggctcgcggcgaaaacgttccgcccaggcgctgtcattgctgcgccgcgcctgccgcgcctctgcatcctgcaggcccggatggccgccttcaacgatcagcccgcgcatgcctgcgcgcggctggctggcgaagttcattgccacccggccgcccagcgagtagccgatcagccaatacttatgtatgttgtaactattaagcgtagactgcagcagagtattgaccccggcaaagtcctgcaccgcgatatccgcggagccgccgtgccccggcagatcgaggtacagccgcggccaggcgggaaaggcgtcgcccactttccgccactcgttgcggtcgccggaaaaaccgtgcagaaacaccagccagggatagcccggctggccgttgtcgacagcagcgctgaggatcacaggcgacttacctgcgccagcagctgctggagggtctgcgcgccgtcggtctcattgaccgccagctcaatcaccgtcgcccctgccctgcgccaggcgccggccagcgcctcatccagcgacggccagtcatcagggcgatgataggccaggccgaacatcgccgccgcgtggctgaaatccacgtcctgcggcattaaatagaactgacggcgttcgtcctgcggcgtcggcagcatagaaaaaatctgcccgccgttgttattcaccacgatcagcaccagcggcgccgacgcctggcgcagcagggccagcgagttgagatcgtagagcgcggagagatcgccaacgatggccagcgtcggtcgggcgctggcgcgctgcacgccggccgcagtggcgatcaggccatcgatgccgctggcgccgcggttgctgtagaccggatacccggccggtagctgcgccagggcgtcgatcaggcgcaccaccaggctgttgccaacaaacaattggccctgctccggcagatagccccgaatacgctgcgccagctgcgcttcgccaaaaggctcgttgctggcgactgcagcctgccacgcctgcccggcaagctgtgggatcaccgtcgcccacggctggcgtttctccgccggatgtaattcgagccagcgctcaacgcttgagagcagacggcgaccgcggtgctgcgccgggtcgaggcgaccgggcagattatccaccagccagtattcatccggctcgcaggtcgcctgccactggagcacgcgtttgccggtcaggctgctgccgagttgcacgacgatctgcgcctgcgccagctcgctgaccgctttgccgttgcccagccacaggtcggcgcacggcagcggctgcccggtctgcgacaggacatcgccgatcagcggccagccgagggtctgcgcccactcagcgacctttttcccttccgcggcgctcattctgcccgccacgacgacgccgcgtttttgtcgccagaagaaccagtcgcgctgcttctcgctctctaactgcagcgcctggcgcagccagggtttgtcgctctgccaccagttgccgagctgctgctgccactccacgccggtctcatccatatcaccatacagcggttcagcgaacggacagttaatatgcaccccgccggcgtgcagcgcgcccagcgcctggtcgatggttgagaccagccagcgggcaggaatatcctgcgagggacgcggcaaagaaatcgtctgcgcaggatgggaggcaaacatccccggctggcggatagcctggttcgcgccgcagtcgatcagctccggcggacggtcggcggtcaacaggatcagcttttcaccggtgagccctgcctcaatcagcgccggatagaggttcgcggtggcggtcccggaggtgactatcaccgccaccggctgccggctggccttcgccaggccgagcgccaggtggccgaggccgcgttcgtcgaaatgggtatgatggataaaggcgcggttttccgccgccgccagggttaagggtgtcgagcgcgagcccggcgcgatgcagatatgctgcacgccatggcgcgttaaagcttccaggatcaccgccgcccagcgtcggttaaatgcgcttactgacatgaaattgtccggtatcaaatattgatgctaagtatagataaggcaaagtgacgtcgttttgatatgcatcgtcattcaagctttatggacacagcagcgagcgcagcccggccgctttgttgtctatctcctgccactcctgctgtgcatcagagccgctgacgatccccgccccggcatacagccgcagggtgtcgtggttcactttcgccgaacgcagcgccacgcaaaactcgctttgcgccagtgacagatacccggcggacccggcgtaccattcgcgggaaaacggttcatgacgctgaatgaacgccagcgccgcccggcgcggcaggccggccaccgcggcggtgggctgcagctgcagcagacagcggctgtcgtcaggcgccgccagctcggtccagatgcagcgtcggagatgctgcaccttacgcagcctcaccacctgcggcggcaggacgtccagcgtcgaggcctcactctgcaggcgctggcagatatcctctaccaccagcatgttttcccgctggtttttgtcgtctttcatcaaccagtcggccagttgctgcgccttcgcgtcttcctgatggttcgcgacggtccccgccagcgcttcggtgcgcagcagcgcgccgcgccggcgccacagccgttccggcgtggagccgaaaaatgcctgccgggcattgaacgccatcaggaaatgaaaacagttaagattgctgcgccggctagccgccatgatgctcacggcgtccagcggggcggcaaactgcaggtcggttgcccgcgccagcactactttatccatttcaccggcgctgatcgccttagtcgcccgcgcaatcattgcctgccattgaggatagtcggatgagtggcgctcgctcagcaacggcggtatggcgccgggagtcgcctgagtggttgtcaggctggcgagaaacgcgcgggccgtcgcggcatcctcacgcagggagatatcactatgcagcaccagccgcagcacggccctgccgccgcaccggcgccactccagacgcggcagcgccaggctgccctgctgcggttcaaacgcattcaggccgcagatacgcagatcctgccggccgacctggcgtaaaaagcggttcgccgcgtcgagcgaggtaaaggtttttaccgcccccagcgtcgccagttcctcatcgccattgcgctgctgccagtaaaactgcggccattgcgcctgctggccgcaccatagtagcggatcgaaggcatcattcagcggaaaagcaacatcgataattcgcgtgccgggcaagtctggaaaagactcgcccaggccgtcttgcaaacgggccagcgcagtggaaacagacagcacgcaaacctccacggtagtaaaaccccacattataaggggttcgacggcggaatagcagtacccatgatgagggagcgggttttatcttacccgctcgccgggtcagagctgcgtgtggacgagggtgcagaggagtcagacagtgcgcttttctcgcgccatgccaatgtgggggatgccatcctcatcatagacctcggtcaccggcgtaaaaccgaagtgggcgtaaaaggattgcaggtgcgcctgcgccccgaggtaaatcgccttttgcggccagtgctgctgacagctggccagcgcctgctccatcagctgatagccgagcttcgcaccacgggcggcggggctgacgatgacccggccaatcaccaccggcgcaaactcctcttcgcttttgaggatccgcgcgtaggccaccagttcgccatcgcgccagccgagcagatggcgattttcaccaaccaaatcatcgccgtcgacatcctgatagacgcactgctgctctacgacaaagacttcactgcgcaatttcagcagcgcatacagctggggaacggtgagttcactatggtggagatcctgccaggtcatcatctgctgctccttattgatatactgatactttgcgactcgccctgaggacactggacgatggaattaacttttttggggacatccgccggggtgccgacccgcacgcgtaatatgacgtcgataatactcaatttgcaacagccgacccgcgccgaaatgtggttgtttgactgcggcgaagggacccagcatcagtttcttcacacgccctaccatcccggcaaactgaataagatttttattacccatctgcacggcgaccacctgttcggcctgcccggcctgctgtgcagccgctcgatgcagggaaactccctgcccctcaccctctacgggccaaaaggactcaaagagtttgttgagaccgcgctgcgcctgagcggttcgtggaccgactatccgctcaccatcatcgaagtcggccctggtctggtgttcgacgaagagggctatcgggtcaccgcgtatccgctcagccatccggtggagtgctatgggtatcgcattgcgcagcatgacaagcccggcaccctcgacgccgcccagctgattgccgatggcgtgcctcccgggccgctgttccatcaactcaagcgcggacagcgcgtcacgctggcagatggccgggtcatcgacggcagccgctatctggggccagcgaccccgggtaaaacgctggccatcttcggcgataccgccccctgcccgcaggcgctggagatggctcgcggggcggatgtgatggtccacgaaaccacccttgagcaggcgatggcggagaaagccaatagccgcggccactcttccagtcagcagaccgcggcgcttgccaaagaagcgggggtcggtacgctgatcgccacccactttagctcgcgctacgatgccgaaggctgtctgcgtatgctggcggaatgccgggagattttccctaacacgctgctggcggaagactttatggtctacaagatggcgtaaaatccgggcataaaaaaaccgccatcccggcggttttttattgagtcaatcaacttacatcagcggcgtcgccagctgcacgatgctaatcagcggctgcggccagataccgagcaccagcaccagcagcgcggagatcagcaccacgataccgccggcgctgtactgccagtttgacggcgcatcgcgattcagctgctccggcgcgctcagatacaggctgacggccacgcgcaggtagtagtagagaccgatcgccgagccgacaaccaccgcggcaaccagccaccacagatgcgcatgcacaccgacggccagcacgtagaacttaccgataaagccgagggtcatcgggataccggccagggagagcatcatcaccgtcatcacagccgacaggatcggacggtgccagaacaggccgcggtaggagaacagcgagtcagcatccgggccgcggtacgggctggacatcaggctgaccacgccgaacgcgccgaggctgctgaacaggtaaccggccaggtagacgccaacggcttccatcgacatttcaccgctctgcagggcaatcagcgccaccagcagatagccgagatgggagatggaagagtaaccgagcaggcgcttaatgttggtctggctcagcgccatcaggttaccgaagatgatagaggcgaaggcgatcaggcccagcaccacacgtaccgcttcgctgttgcccaccggcatgtacaggaacagacgcatcactacgccgaagatagcgatcttgctggcggtcgccaggaaggtggagaccggcgcaggcgccccctggtaaacgtccggcgtccacaggtggaacggcaccagcgacagtttaaagccaagaccgacgatcatcagaccgaggcccgccagcagcagcggctcgtgcagcatgttgtccgccaggcttttgcccagcgcgaggaaggacagattgccggagttcgcatacaccagcgccataccgaacagcaggaaggacgaagctgccgcggagaggatggtgtatttgatgctcgcttccagcgaacgcttctggcggaaggcgtaaccaaccaggccgaacagcggcagcgaaatcagctcaataccgaggaacagcgccgccagatgattcgcaccggccagcagaatgccgcccagggcggcgatcagcaccagcaggtagaactcttctttgttgtccttgtaaccctcaagccacgggtaggcgaaagtacaggtcgcgaggctcgccagcagcaccagaccggtgtaaagcatggcgtagccgtcaacgcggatcagcggcgtgacgtccatcgccccgttctggccgacgaaccagagcgagaccagcgcggcgttaagtccaagaaccgacagcgtggcattgagaaaatgattgcgtcgccacgcaatggagagcatcacaaccaccaccgtcaagccgacgatcagcagcggtagcagtgcgatcagttgttgtggagttattgtcatggcgaattacggccttgtagtagaaacagaattaacaaaccactgctgaatgttgctcatcgcagcatgcgaggtgtcgaggatcggctgcgggaagaagcccaacagcaccagcagcaccaccagcagcaggatgatagacagttcacgcagggacatccccggcaactctttcgccgccacttcgctcttcgctttaccgaagtaagcgcgatgtaacatcgacagcgagtaaacggacgcgaataccagaccaaaggtggagataacggtgatcgtcggcaccactttatagctgccgaacaggatcataaattcgccgacgaagttaccggtgcccggcatccccagagtggcgaccgcgaagaacatcgacatcgccggcagccatttaattttgctccacagaccgcccatttggcgcatatcgcgggtatgcagacgttcgtacagctggccgcagagaataaacagacccgccgcggacagaccgtgagcaatcatctggatcaccgctccctgataggccagctggctgccggtgtagatagcaatcagcacgaagcccatgtgggacacggaggtgtaggcgatcaggcgtttaatatcggtctgggcgaaggccatccacgcgccgtagaagataccgatcacgcccagccacatggcgatgggcgcaaactcggcggaggcattcgggaacagcggcagcgcaaagcgcagcaggccgtaggcggcggttttcagcaggatccccgcgaggtcgacagagccggcggtcggcgcctgggagtgagcgtccggcagccagccgtgcagcggcaccaccggcattttcaccgcgaaggcgatgaagaagccgagcatcagcaggtattccacgccgtgagacatcggggttttcagcagatcttcatagttgaaggtccacacgccggtggcgttgaagtggacgaaggccagcgccagaatggcaatcagcatcaccagaccgctcgcctgggtatagatgaagaacttggtggccgctgtgatacgcgttttaccgtccgaggctttgtggccccacagcgcgatcaggaagtacatcggcaccaacatcatttcccagaagaagaagaacaggaacatgtcgatggcgaggaacacgccgataacgccgcccaggatccacatcaggttgaggtggaagaagccctggtatttttcgatttcacgccacgaacagagcaccgccagcacgccgaggagaccggtcagcaccaccatcagcagcgacaggccgtcgatcgccagatggatgctaatgccgaagcgtgggatccacggcagcacgaattccgactgccattgcggaatacccgcggattgcgtcagagaatagccgccctgcatccacagctgcaggccaagcaccagcgtcagtcccatggtaatcagcgcgatccagcgcggcactttcacgccaaagcgttcggtctgccagcacaggaagccgccgataaagggaattaatattagccagggtagtaacatggcgatttttattccttgttaaagtcccgttcaggaccgattttcaacgaattcgactacattcacgtttgagtgcggtttgttgtgtcgggtggcgcttcgcttacccgacctacggtctcgtaggcccggtaagcgaagcgccaccgggcaaaaccgcgcgatcaaatcaacgcaataccatcagcagcgccagcaccaccaccgcgccgatgctcattgaagccacataccagcgcagataaccgttctcgctcaccagcaggcctttgcctgcgaagcgggaaaggatcgccgggatattcatcaacgagttcagcggatcgcgtttcagcagccaggcaataccgaggaatggttttacgaacaccttgtcgtataaccagtcgaagccccaggcatggaaccaccaggtaccgaagaagcggccaggcgcactgttggcgatggaggtcaccagcgtgcgtttgcccagccacagccatgcagcgatcagaatcccggcaatggcgatgatcccggaggcaatctccagcgtcatcacgctaccgtgggcgagctcagtggtctgcggcagtacgccttccagcggcggcacaatcagcgcgccaacgaaggtggatagtaccagcagcacaatcaacggcagatgatgggtaatccccttccctgcgtgcgcgtgaatttgctctttaccgtggaatacgatgaaaatcatccggaaggtgtacagcgaggtcataaaggcgccgaccaggcctgccaccatcagattgatatggccattggccatcgcgcctgccagaatctcatccttactgaagaagcctgcggtgataagcggcagtgcggacagcgccgcgccccccaccaggaagcagacgtataccagcggaatcgatttgcgcaggccgcccatcttgaagatgttctgttcgtgatggcaggccagaatgaccgaaccagacgacaggaacagcagcgctttaaagaacgcgtgagtcatcaggtggaaaatcgccgcgtcccatgcctgcacgcccagcgcgaggaacatgtagccaatctggctcatggtagagtaggcgagaacgcgtttgatatcggtctgcaccagcgcggcgaagcccgccaacaccagggtgaccgccccgacgataccgaccagatgcagcacttccggcgtcatcaggaacaggccgtgggtacgggcgatcagatagacgcccgcggtgaccatggtcgcggcgtggatcagcgcagagaccggcgtcggacccgccatcgcatcggcaagccacgtttgcagcggcagctgggcggatttaccgaccgcgccgccaagcagcatcagcgtcgcccactgcagcgtggtgctgccgttagcgaagtgctgcggcgccagctccaccatttcgcggaagttcagggtgcccagttcgttataaagaatgaacagcgcgaaggcgaggaacacgtcgccgacgcgggtcaccacaaacgctttcatcgctgcggcgccgttcttcggatcggtgtagtagaaaccgatcagcaggtaagaacagaggcccacgccttcccaaccgaggtacatcagcagcaggttatcggccagtaccagaaccaccatgctggcgataaacaggttggtataggcgaagaagcgggaatatccctcttcaccgcgcatgtaccaggaggcgaacatgtggatcaggaagccgacgccggtaactacggagagcatggtcagcgacaggccgtccaacaccaggttgaagccgatgttgaaatcaccgaccgacatccaggtccacagcggcacgctgaccgcctgtttgccgttagcgaaaaagtcgacgccaacgtacgcggtgaccagcgccgccaggcctaccgagcccatgccaacggcggcggaaagattttccgaccagcgcccgcgggagaaggccagcagcacaaagccaatcaatggcaaaagaatggttaaggcaagcatgttcatccacgcaactcacttactgaatcgatgttcaggttctggcggcgacgatggagctgcagcagcagcgccaggccgatactcgcttccgcagccgcgaggctgatggcgaggatatacattatctgaccatctgcctgaccccagtagctacccgccaccacaaaggccagcgcggcggcgttaatcatgatttccaggctaatcaacataaacagcagattgcggcggatcaccagccccgtcagaccaagcacaaacaggatggccgcgaggatcagtccatgtgttaaggggatcatgcgtgttcctccgtttttcgtttgtcgctgtcgttcagacggttgctcagcacctcgccggcgcgctcttcgcggccaatgtggaaggcaaccaccaggcccgccagcagcagcatggaggccagctccaccgccaggacgtacggcccaaacagcgcaatgcccacttctttggcgttaatcgccgcaccgtcgataccctggtcgttaatgcccaggatggcgtaaacgataaccaccagcagcaccgcggagaggatggccgggccaatccagatccccggctgcagccacttgcgctcctgttcgatctcggtgccgcccaggttgagcatcatcaccacgaagacgaacagcaccataatggccccggcgtaaacgatgatttccagcgcaccggcgaagtaagcgcccagcgagaaaaacaccccggcaatcgccagcagcgaaataatcaggtacagcagcgcatgcaccggattggtgtgggtgacgacccgcaaggttgcgaggatggctatcaggccacagatataaaaagcgaattccattgcccctctccttacggtaacaggctcttgacgtcgattggcttagcttcattttccgcttcgcccttatctttgccgtcgattgccatacccgccatccggtagaagttatattccgggtatttgcccggaccggaaatcagcagatcctctttttcgtacaccagatcctgacgcttgtattcacccagctcgaagtccggggtcaactggatcgccgtggtcgggcacgcttcttcgcacaggccgcagaagatgcagcgtgagaagttgatgcggaagaactccggataccagcggccgtctaccgtctctgctttctgcagcgagatacagcccaccgggcaggctaccgcacacaggttacaggcgacgcagcgctctgcaccgtccggatcgcgggtcagcacgatgcggccgcgatagcgcggcggcaggtagaccggctcttccggatacatccgggtttcacgtttggcgaaggcatgcaggccaatcatccagatactacggacctgggtgccgaaccccaccaataattcttttaaggtcatgttcaattcaccccttattgcgcctgccagagaatgacagccgccgttaccaacaagttgaccagcgttaacggcaggcataccttccagccaaaggacattacctggtcatagcgcggacgcggtaatgatgcgcggatcaaaatgaacatcatcatgaagaacgcggttttcagcgcgaaccagatgaaaggaggtaaccacgggccattccagccgccgaagaacagcgtgacgatcagcgctgaaacggtgacgataccgatgtattccccgacgaagaacagaccgaatttcatgccggaatattcaatgtggtaaccatcggccagttcctgctccgcttccggctggtcgaacgggtgacggtgacacaccgccacgccggcgatggcgaaagtcacgaagccgaagaactgcgggataacgttccacagatgcgcctggttgttgacgatatcggtcatattgaatgaccccgcctgcgccaccacgcccatcagggagagaccgagaaatacctcgtagctcagggtctgcgcggaagcacgcatcgcccccagcagcgagtatttgttattgctcgaccaaccggcgaacagcaccgcgtagaccgccaggcctgccatcatcaggaagaagaggatgccgatgttcaggtcggccaccacccacgtcgggctaaccggcacgatagcgaaggccagcagcagcgaggtaaaggcgataaccggcgccagagtaaagatcacgcgatcggagaagcgcgggatccagtcctctttaaagaacatcttgatcatgtcggcgaccagctgcagcgaaccgccccagccgacgcggttaggtccgtagcggttctggaacaagccgagcagacgacgctcgccgaagctcatgaacgcgccgcaggtgacaaccaccagcagaatgaccacggccttcaggatgcttaacagaatgtcgataagatccggcgttaaccagctcatgctttcgcctcctgcagtgaatcaatacgcgatccggtcagcaccggcgcaatgcccggcatgcccatcggtaagccaacctgtcccgcggtcaggccttcagagataaccagcggcagacgcagggtctggccttccacgctaaaggagagcattgcgcctgggttgacgccaagcttcgcggcatccgccgggttcagcttgatgtacggctcaggcatccggctctggaacaccggcgcgcgctgagacagctcatcgctgccgaacagatggtagtacggcgcaattcgccatttgccctcttccgcctggaagctggccggcaccgccgtgaagtactccagtccgctggcggacgcttcaaacagacgaacgcccggatcgccgtggcgcagtttcccgcccacttcatcctggaacttgttccatgcctgcggggagttccagcccggcgcccaagcgaacgggatctgcgaacgcggggcggacggctggttgttcccttccatggagaaggcgaacatcgtgtctttatcctgcggctgacgcggctcgtgcacgctgatgttagcgcgcatcgccgtgcggccgctgtagcggtgcggttcacgcgccagcttctggccgcggatgcggaaggtcgcatccggcgcggcgtctttaatgcccgccagctgcggcagcgcggcaatcgccgcatcaatgacgtggtccagctgagtccagtcaacctgacggttgttgacggtgctgtgcagcgaatgcagccagcgccagctttccagcattacggttttcgcgtcgtagtaagccggatcgtaaacctggaagaaacgctgggcgcgaccttcgttgttcaccacggtaccgtcgctttccgcaaagcttgccgcggagagcaccaggtgcgctttgtccataatcgcggtgcgctgatgatccaccaccatcaccagcggcgctttcgccagcgcagcgtcaacgcgcgcggcggaagcatgacggtgaaggtcgttttccagcacgataaccgcgtctgcggcgccgctttccagttcgtccagcgcctcttcaagcgagccgccgccgatcatgcccagtccgacgctgttaaccgcccgggcgaccatggtcaccccgacatcggcgccgcggcctttcagagctttcgccacgttagcggcggcctggatgatctccatgctgccggcgttggtcccggagatgatcagcggttttttcgccccggccagcgcctgaacgataacgtcgactttaccctgcaggtcctggctcaggccgtcaaccgccggcgcgctgtcgtccagcgcatgggcaatagcaaagccgagacgcgcctgatcttctaccggcgcacggtaggtccacgccgcgatgtcatccaggcgggtgtcatcgacgttggtgacgaatagcgggtgcttggcgcgctggccgatgttgaggatcgcggcgatctgccagtcggccactttctgcgccgccgccatttcgcgtgctttccctttcactgcctggcgtaccgccagggccacgcgcgcgccggtctgggtaatgtcttcgcccagcaccagtaccgcatcgtaggattcgatatcgcgcaggcttggcgtgtggatcccgccctcgcgcagcactttcagcatcatctgcaggcgcgcttgttcgcctttggcgatgccggtatagaagttgtcggcgcccaccagctcgcgcagcgcgaagttgctttcaatgctggcgcgcggggaaccgatgccgatcactttcttcgactggcgcaggatatccgccgccccctgcatcgcctgctcggcgttaagggtgatcagatcgtcgccgcggcgctgcaccggctgacgcggacggtctttcaggttcacgtagccatagccgaaacgaccgcggtcgcagaggaagtagcggttcacggtgccgttatagcggttttcgatacgacgcaactcgccatagcgttcgcccgggctgatgttacagccgatggaacactgctggcagatgctcggcgcaaactgcatgtcccacttacggttatagcgctcggagtgggttttgtcggtgaaaacgccggtcgggcagacttccaccaggttgccggagaactcgctctccagggtgccatcttccgggcggccgaagtagacgttgtcgtgcgcgccatagacgcccagatcggtgccgtcggcataatctttgtagtagcgcacgcagcggtagcaggcgatgcagcggttcatttcgtgcgaaataaacggccccagatcctgattgcggtgggtacgcttggtgaaacgatagcggcggaagctatgaccggtcatcaccgtcatatcctgcaggtggcagttgccgccctcttcgcagaccgggcagtcgtgcgggtggttagtcatcaaccactccaccacgctttcgcggaactgcttcgcttcgctgtcgtcgatagaaataaaggtgccgtcggatgccggagtcatacaggacatcaccaggcgaccacgcgtgtcttccgcgttctgatattgcttcaccgcacactggcggcaagcaccgacgctccctagcgccgggtgccagcaaaagtagggaatatcaagaccaagagagagacaagcctctagcaggttgtccgccccgttgacctcgtattctttgccgtctacatgaatcgtagccatttgcgtgcttccaaaaataaaaaacctttagattaccagcgcgtcttaagcaggttcggctgaatcccgttgattgcatgggtattgctgaactgctgcttaatgccagcctcgaattcttcgcggaaatatttaatcgcgctctgtagcggctcgaccgcgcccggcgcgtgcgcgcagaaggttttacccgggcccaggaatcgacacagttgctcaagggtttcgatatcgccaggctggccttcgccgcgctccagggcgcgcaggatcttcacgctccacggcagaccatcgcggcacggcgtacaccagccgcaggactcgcgggcaaagaactcttcaaggttacgcaccagcgagaccatgttgatctcgtggtcaacggccatcgccagcgaggtgcccagacggctgcccgctttaccaatgctttcgaattccatcggcagatcgaggtgcgcttcggtgaggaagtcggtccctgctccgcccggttgccaggctttaaacttcaggccatcgcgcataccgccggcgtaatcttcgaggatctcgcgggcagtggtgccgaacggcagctcccagacgcccggattcttcacccggccggagaagcccatcagcttggtgccagcatctttgctggtggaaatgttctggtaccactcgacgccgttggcgaggatcgctggcacgttgcacagggtttctacgttgttgacgcaggtcggcttgccccagacgccggagctcgccgggaacggcggcttggatcgcgggttggcgcggcggccttccagagagttgatcagcgccgtctcttcgccgcagatatagcgccctgccccggtgtgcacgaacagctcgaagtcaaacccggtgccgaggatgtttttccccaacagacccgcttcggtggcttcagcaatcgcgcgacgcagatgctgggccgcttcaatatattccccgcgcaggaagatgtagccgcggtacgctttcagcgcaaacgcggagatcagcatgccttccaccagcaggtgcggcagctgctccatcagcaggcggtctttataggtgcccggctccatttcatcggcgttacacagcaggtaacggatgttcatggattcgtctttcggcatcaggctccacttcagaccagtggagaagcccgcgccgccgcgccctttcaggccagcgtcttttaccgccgtgacaatctcatccggggccatcccggtcagggctttacgcgccccttcatagccatttttactgcgatactcgtccagccacaccggctgcttgtcgtcgcgcaggcgccaggtgagcggatgcgtttccgcagtacgaattacggttttcatttgtactgctccagcaggtcaggaattgcctccggcgtcagatggctgtgagtatcctcatcaatcatcatggtcggtcccttgtcgcagttacccaggcagcaggtcggcagcagggtaaagcggccatcaaaggtggtctgccccggcttgatattcagtttcttctcaatggcggcctgaataccctgatagccggtgatgtggcataccacgctgtcgcagtagcggatcacgtgacggccaaccggctggcggaaaatctggctgtagaacgtcgccacgccttccacgtcgctggccgggatccccagcacatcggcgatggcgtagatcgcgccatccggcacccagccgcgctgtttctgaacgattttcagcgcttcgatggacgccgcacgcgggtcttcgtagtggtgcttctcgtgctcaatagcctcacgctctgccgcactcagctcaaaagcctcggtttgtggttgttgattctcgtgcataattagcggtccacgtctgacataacaaaatcgatactacccagatagacgatcaggtcggataccaggctgccgcggatcgccgacgggatctgctgcaggtgcgcaaagctcggcgtacgcacgcgggtacggtagctcatggtgctgccgtcgctggtcaggtagtaactgttgatccctttggtcgcctcaatcatctggaaagattcgttggccggcatcaccgggccccacgatacctgcaggaagtgggtgatcagggtttcgatatgctgcagcgtgcgctctttcggcggcggcgtggtcagcgggtgatccgctttgaacgggccttccggcatgttatcgaggcactgctgaagaatgcgcagactctggcgcagctcttctactttcagcatcacgcgggtgtagcagtctgagacgccccccccggtcgggacttcgaagtcgaagttttcatagccagagtaaggacgccatttacgcacgtcgaagtcgataccggtggcgcgcaggcctgcgccggtggtgccccactccagcgcctctttggcggtataggctgccacgccgacggaacggcctttcagaatggtgttgcgcagggcggccttctcataggagtccagacgcttcggcatccactcgaggaactcacgcagcaggcgatcccagccacgcggcagatcgtgcgcgacgccgccgatgcggaaccacgccgggtgcatacggaacccggtaatcgcttccaccagatcgtaaattttctgccgatcggtaaaggcgaagaagaccggcgtcatcgcgccgacgtcctgaataaaggtcgagatatacagcaggtggctgttgatgcggaacagctcggagagcatcacgcggatcacgttcacgcgatccggtacggtgatcccagccagtttttccaccgccagcacgtacggcatctcgttgacgcagccgccgagatattcaatacggtcggtatacgggatgtagctgtgccaggactgacgctcgcccatcttctcggcgccgcggtggtgataaccgatatccggtacgcagtcgacgatctcttcgccgtccagttgcagaataatgcggaacgcaccatgcgccgatgggtggttcggaccgaggttgaggaacatgaagtcctcgttgtcggtgccgcgcttcatgccccactcttccggtttaaaggtcagcgcctccatctccagatcctgtttggctttggtcagctcaaacgggtcgaactcggtggcacgcgccggataatctttacgcagcgggtgaccttcccaggtcggcggcatcatgatgcgacgcaggttcgggtgaccatcgaaggtaatgccaaacatttcccaggtttcacgctcataccagttggcgttggggaacagtttggtgaaggtcggcagatgcagatcgttttccgacagcgccaccttgagcatgatgtcgcggttgcgatcgatggagatcaggtgatagaaaacggaaaaatccgcggcgggcaggccatcgcggtgcgtgcgcagacgttcgtccatgccgtgcaggtcaaacagcatcacgtaaggcttcggcaatttcttcaggaaatcacccacctccagcagctgttcacgcttcacccataccaccggtacgccggtacgggttggctgaacggtaaaggcatccggcccaaagcggttgcgcagttcgccaatcaccgggtcatcaaggtgatcgcgggtttgccaggctggtgcggcgtcatgcgcggttaaatcggtcatattgttcaccattgcaaaaggtccgtggtgactgccggcgagacttcgcgctgttgtagattgatttgcgaagtggttctcccgcccgcaggcgcaaattaaatctcgtccggcgtccgcagattggtcactgcaatacgttcgccgcgtttacgctcgcgttccgactgcatattggcgcgataaacgccctgatcgccaaccacccatgagagcggacgacgttctttaccaatggactcctgcagcagcatcagcgcctgcatataggcctccggacgcggcgggcagcccgggatgtacacatcgaccggaatgaatttatccacgccctggacgacggaatagatgtcgtacatcccgcctgagttggcgcaggcgcccatggagatcacccacttcggctccagcatctgatcgtagagacgctgaataaccggcgccattttggtaaagcaggttcccgcgaccaccatcaggtccgcctgacgcggagaggcgcgcagaacttctgccccaaaacgcgcaacgtcatgcaccgcagtgaatgacgtcaccatttccacataacagcaagaaaggccgaagttgtacggccaaattgagttcttacggccccagttcaccatgtcatgcagcgcgtgttcgagtttccccatatacacgcttttattgacttcctgctccagaggatcggtaacgatctcctgtttctgcagggggtaacggtcgttctcaccgttaggatctatgcgggtgagcgtataatccatcttattgcctcgcttttactgcatatgacggttagtgggactgtctgtttccgggttaaccagcgtgcgacgggaacgcgcgggcgtccagtccagtgcgccgatgcgaacgagataaaccagaccagccagtagcactaaaatgaaaattgcggcttccacaaagccgacccagccgctctcgcggatagaggtcgaccatgcgtagagatacagggcttccacgtcgaagataacgaagaacatggcaaccagataaaacttcgcagaaagacgtaagcgggccgaaccgacggagtcgatccccgattcaaacggcgtgtttttactacgcgcgcgcgcgcgaccgccaaggtaccagccgccgacgagcatgaggcagcacaggccgatagcgatgatgagaaatatagcgaatgcccaatgatgagcgatgacttcagtggatgttgacatacgcattgcttaaccaaaaaagtgtagcgccaaaaccctctgctcttactggcagatgaacgccacagcgtttcacgggaggaataaaaaataaccgtgcaaaaaagcgtccctggtcgatgtgagaagcccagatgccgtggctttttacccctttctttaaccttttgtcaactttaacaaaagttttcataacattaatttacattggaatcttttcattaacattaaatgcccttttctgcgaaataaccttgcatactgttcggttttagtgttgttgaatcgtgtccgtttccgtcgtaaatcaaaaatcccttctattttgacaggatttagcctcgattcctccccccaaagaggggtattttcttgatctgcgacacggttttgttaattaccccaggaaatcggcaacaatccatccggttttttaacattagcaggaagtgttgaaagtgcagggaaaagtcgacaagctgagcgccttgtcacgccaatacgctgatttttctgcaaagaaatacaaaaaagattcaaaacatcaataagagtgcaaaaaaaagagccgccaggcgggaaaccaactcctgaggctctttttgggcacttacattctgttaccagtttttgtgatctttgttagcaagaatacccttacaaaaccaaggtattccctccctcttccggagtaagtgctgtgcccgtttcccagggatggatctcctgactcagagactgaaaaatcgcctgcggcagttcgctcaccgtccgcggattgcagctgacgacgtaccgggtgtccggcaacgccggtaacccctcactgatgccagccacgcgtagatccgggctcatcatttcgaccgggcgcgccgtcacgcccagcccggccttcaccgccgctttcacgcccgatagcgaggaagctccgtgggccagatgccaactgacgcgagcagtttccagcgcggcgataatatcctggcggaatgggcttggctcttcgagcaggatcagggggatagattcccccttcgccagcacatattccgctgcacaataccagagagtaggtgatgttctcagggtaaaagaggtaaagccgggaggctgatgggtggtcaacgccagatcgaccagcccctcggccaacatctccatgatggcggcatgggggtgaactttgatctccaacgtcattctgggatagaaacagccgatgcggtttaacaaaaacggcaggatggtgtcagccgtttcttctgacgcgccgatgctcagagccccctgcaggctgccatacatcagcgacatacaggcttcatcgttaaaacggagaattttgcgggcatagcccagcagctggatcccctgctcggtcagcagcttattgcggccgtggcgggcgaaaagctctttgcccaccagctgttccaggcgttgcatttgctgactgaccgcggactgagtacgacacactgcggcggcggcggcggcaaaagtgttcaaatcagcgaccgcgacaaaggtacgcagcagatcgagatcgaggttgagtatgggacgagttgtattaatcatctttcttcacttacaggtggctaacgctgacctgccttgttgatgctttacgccaggtttccggctattccctgagcctcgtgctcaccgtctaacggcggataaacaactggacgaacgttattacatgccaaagtactcgtctgggcaaatgcgcagaactgcggagtaatatattgttcgtatttctcattattatttattaccacgaccagccaggcgccatacgtcgccgcgggaacccggtcagtgatgctgagaaaatcgctcttctggcgtaactttccggcagaaaaggaacaataaaatcctgtaataacaatatattaaatctcaatgcaaccgcagttcttggcggttaacacggatattaacggtgatattctaacctatccccctcctttttataagccttaataaggattaactgagacaattttaaatttttttcaacattttatattaattaacaaacctcagattattacccgctaaaaataataataatgtggtcgcacgctgttttttattaaaattatttaacatcaaaattacaagccaatcgcgcttgtatgcaggatagcgttttttagcgactcccccttctcactccccatattaccgggcaaacaaacgagataaatgatggcaaaatcgctactaaatctatatttacgaccaaaaaatcgacataaaaaggcataagccacagaccaaatccgcaatcggtagataaatcaattgcgcttaaaatccggcgttagcaaaatcttctcctgcaaagccttcaaaacagcggggagggggagtacattgttccgtgctgacttccacggcagggagtggcgataacagctaaaaggtcaagattcatgtcccccatcgaaaaatccagcaagttagagaacgtctgttatgacatccgcggcccggttctgaaagaagccaaacgtcttgaagaagaaggcaataaggttctgaaactgaacatcggcaacccggcgccattcggcttcgaggcccctgacgagatcctcgtcgacgtcatccgcaatttgcctaccgcccagggttactgcgattcgaaaggattgtactcggcgcgtaaagctatcatgcagcattaccaggcccggggtatgcgcgatgtcacggtggaagacatctatatcggcaacggcgtgtccgagctgattgtgcaggcgatgcaggcgctgttaaacagcggcgatgagatgctggttcccgccccggactacccgctgtggacggcggcggtgtcgctttccagcggcaaagcggtgcactatctgtgtgacgaatcctctgactggttcccggatctggacgacatccgcgcaaaaatcacaccgcgcacccgcgggatcgtgatcattaaccctaacaaccccaccggcgcggtctattccaaagaattgctgcaggagatcgtggagatcgctcgtcagcataatctgatcattttcgccgatgaaatttacgacaagatcctctacgacgaagcccagcatcactctattgccgccctggcgccggacctgctgacggtgacctttaacggattgtcgaaaacctaccgcgttgccggcttccgtcagggctggatggtgttgaatggcccgaaaaaacacgcgaagggctatatcgaagggctggagatgctggcttcaatgcgtctgtgcgccaacgtgccggcccagcatgctatccagacggcgctgggcggctatcagagcatcagcgaattcatcatccccggcggacgcctgtatgaacaacgcaaccgcgcctgggagcttatcaacgatattccgggcgtctcctgcgtgaagccaaaaggcgcgctgtatatgttcccgaaaatcgatgccaaacgcttcaatattcatgacgaccagaaaatggtgctcgacttcctgctgcaggagaaagtcctgctggtgcagggcaccgcctttaactggccgtggccggatcacgtacgcatcgtgaccctgccgcgcgaagacgacctggagatggctatctcccgctttggccgcttcctctccggctaccatcagctttaatcgcgccgccgccggcatttgcatccggcggcgatccctgcgcacaatggaacccgatgttgtcactgattaagggtccctatgagtcagagtcatttctttgcccacctctcccgcctgaaactgattaaccgctggccgctgatgcgcaacgtgcgcaccgaaaatgtctccgaacacagtctgcaggtggcgatggtcgcccatgcgctggcggcgattaaaaaccgcaaatttggcggccaggtcaacgccgagcgtatcgccctgctggcgatgtaccatgacgcctcggaagtactaactggcgatctccctactccggtgaaatatttcaattcgcagattgcccaggaatataaggcgattgaaaaaattgctcagcaaaagctggtggatatggtccctgacgagctgcgcgatattttcgagccgctgattgatgagcatcactacagtgaggaagagcagtcgatcgttaaacaggctgacgccctctgcgcttacctgaagtgcctcgaagagctatctgcaggcaataacgaatttctgctggccaaaggtcggctggaaaagaccctggcatcgcggcgcagcgcggagatggattactttatgcaagtgttcgtcccaagcttccagctgtcgctggacgaaattagccaggattcgccgctgtaaggttctggccgggcggcggttgtgctctacccggccagaatatcttaaaacggaaacagtaccgggatcagcaggacgcagaccaccatcaccagtatggtaaagggcacgcctattttgacaaaatcgctaaatgagtacttgccagggccaagcaccagggtgttaaccggcgaggagaccggggtcataaacgccgccgaagccgccatcgccaccaccatggcaaaaggatagggagagacgcccattgacttcgccgccgctaaggcaataggcgccatcagcaccgccgtggcggtgtttgagataaacagcccaatcgccgcgcacatcatgaacaggcagccgagcatcagataaggcccctcgcctccggcgacatccatcagtcccttcaccaccagatccaccccgccggttttttgcagcgccagggcaaacggcatcatcccaacaatcaaaataatgctcggccagtggatcgccttgtaggcgctttcggcattgatgcagcggaatttgcccatcagcagacaggcgataatcgcggcaatcgggttgggaatttcatcggtgagcatcagggctaccatcagcaccaggcagaaaatcgcatgcggagcctggctgtgggccggcgaagcgtcatcgacctcaaccggcatattgagtaccacgaaatcccggccgcgcttcgccagcagggcaatttgccgccagttgccgaccaccagcaggatatcgccgagctgcagcggctcatcgaccaccgaaccatccatcgctttgccatcgcgcttcatgccgacgatattgagaccaaaccgggtgcggaaggctatctcacgcaccgttttgccaatcatctctgaatccgggatcagcgccacctccgccatccccacatccagcgcctgatcggcaaaatactcgccgcgcaataccatcggctcaagcatttgctcgccgcagaactggcgtaaatcgacatcggaggcggacatatcgatcagcaggacgtcgcgggcgcgaaattccgataccccgttgacgttgacaattacccggcggaaccgccgccagcgttcaacgccgatcacgttggcgcagtagcgctcacgcagctttaaatcatccagccgctgaccgatcatcggcgaacccgggcggatggccagccggcgagcgcggccggtgaggtgatactcgcggatcaaatcgcggaaggtgcttctttttcgcccatcgcgtgcggagtcgccattatccgtcttcagcataaagcgcaccgccagcatatagacgatgcccaggatcagcaccaccaggccaatcggcgtgacgctgaaaaagctgaagccgtgcagtccctcgcgcagcaattcactgttgaccaccaggttgggcggcgtcgccaccagggtcatcatcccgctgataagcccggcgaagctcagcggcatcatcagccgcgatggcgaggtattcatccgcgccgagacgctaagtaccaccgggatgaaaatggcgaccaccccggtggagctcataaacgcgcccagaccggcgacggtgagcatcaggtagatcagcattttggtttcgctgttccccgccacgctcaccagccatgcccccattttggtggcgactccggtgcgcaccaggccatcgccgataataaacagggcggcaatcaggatcacgttaggatcgctgaatccggaaaaagcttcatttaacgtcagcgttccgctgaggacaaaggcgacaatgaccatcagggcgatagcatccatgcgcaccttgccggtagcaaacagcacaaccgcgatggccaggagggataaaacccaaatcaattcaccgttcacaacgtttccttgtcacaagtgggagtcgacatagtggcataaaaaagccccgacgacgcggggcgaaatcatgggtttacgctttaagacgcacatttaccacgccgtcagtctggcgttcaaccaccagatcttccaggctgctcagaacgaggtcggcttcatccaggcgaggggcatcggcgggcacgttgaccgcgatagtgcgacagccggccgccagtccggagaggagccccgccggcgcatcttccaccaccgcgcactccccggcaggcagacccagccgctcggcgcccagcagataggcgtccggcgccggtttgccgtgtttcacctgctcggcggtgacgaacacctcaggcatcggcaggcccgccgcgcggtgacgcgcgtgggcaaccggaatcgagccggaggtgacaatcgcccacgggatcccggcctcattgagcgtattcagcagggctaatgcctccggcagcgcgacgataccctcaatatcagtggcttctatctgctcgaggtagcgaaattcggcctggatatcctcctcgctgcgccccggcataaaatggcgaatggaggtaatggcctgcttgccgtgaataaaactgagaatttcatcatggtcaatggcgaaacgatccccccacttgcaccatgaacgctccaccaccggcaaggaatccaccagcgtcccgtctaaatcgaacaggaaacctttacactgcacgggcacctccctcaggcgttgataatttgattaatttcattactgctcagatgatactggcgcgggcaagcgtgccagacgctcagcatccgctgatatttctcccacatcggggtctgcgagttaaagccatgggtaccggcgtcaaaatggctgtagcggccttcaacgttgaccataaaacgcacatagccgagataacgcgcttcggtggcggcatcaaatccgaggaaggtgacccggcgttcatcgatacccgccgcgtctttcaggttggtccaggagacgtgcagcgcgtggtacatctccatgatatcaataacggtacggcaggtttcttccgtcaactggccaaactcgcggtccagttcacgcatctgtagcccatacccacgctctatgatggtttgcagacgacggtagcgttccgcattatccgggtcgagcatcgtcatcattttgtactgattggataaaatcagacgctgcgcattggtcatttccatgttgtgactcctgtagcacggtagggcgtgaaataaagaaggcgcataaatcatgcgccttcttttatatgcgttttccgtagtgaattacaaatcatcaaggaaagttttatccagttgtttgaaggcgcgcttaagcgtgtcagccagcgcctgataatcgggcttgccttcgaccggtgccagcgcctgccccgcctcctgcagtttaccgcgcacttcatagaaccagttaagaatggagggcggcagcggcgtcaccgaacgcttacccaaccaccagagtccctgcatcggcaggctcagcgcaaacagcgcggtagcgacggcggggcccagctggccgccaagagctatctgccagcagagggtaaaaatggcgattggcggcatgatgcggatggcatagcgggtggcacgaataatgcggttttcaataaacaccggcgcgaggcgcttgtcgagaggccaggtctttgcgtaatgctgcccgcggttgaacaagctaaagaagctaacggggcgtttctcaggggtcgacatggctttacctcaactttacatataaaacttaaaaaattcgtgcaaaacaccaactatgcatgacatcgttcaaaagattttggcaaaggatgccgcaatcaggtatcctgtgcccgcctgaaagggcggttagactctttgccaggctagtcaaattatcgcatattctgccattggctgaaaattatgcaaaatggcataaaatcaaatgtacttctctcatcgtgcccgaaaacagaacaaggcatgatgttaatcataaatgtcgaggtcatcctgcgctacgctaatgacacactgacgtttttttagccacgtatcataaaaaggtacttccatgtcgagtaagttagtactggttctgaactgcggtagctcctctctgaaatttgctatccttgacgccgtgaacggcgacgaatatctgtccggtttagcggaatgcttccacctgccggaagcccgtatcaaatggaaaatggacggcagcaaacaagaagccgagttaggcgcgggcgccgcgcacagtgaagcgctgaactttatcgttaacactattctggcacaaaaaccagaactgtctgctcagctgaccgcaatcggccaccgtatcgtacacggcggtgaaaaatacaccagctccgtggtgatcgacgagtccgtaattcagggtattaaagacgccgcgtctttcgcaccgctgcacaacccggcacacctgatcggcatcgctgaagcgctgaaatccttcccgcacctgaaagacaaaaacgtggctgtattcgatacggcgttccatcagaccatgccggaagaatcctatctctacgccctgccgtacagcctgtacaaagagcacggcgttcgtcgttacggcgcgcacggcaccagccacttctacgtgactcaggaagccgctaagatcctcaacaagccggtggaagagctgaacatcatcacctgccacctcggcaacggtggttctgtttccgctatccgtaacggtaaatgcgttgacacctccatgggtctgaccccgctggaaggcctggtgatgggtacccgctccggtgacatcgatccggccatcatcttccatctgcacgacaccctgggcatgagcgttgacgcgatcaacaaaatgctgaccaaagagtccggcctgctgggtctgaccgaagtcaccagcgactgccgctacgtggaagacaactatcaggaaaaagccgacgctaaacgcgcaatggacgtttactgccaccgcctggcgaaatacatcggttcctacaccgcgctgatggacggccgtcttgacgccgttattttcaccggtggtatcggtgaaaacgccgcgatggtgcgtgagctgtcgctgggcaaactgggcgtactgggctttgaagttgaccatgagcgtaaccttgctgcccgcttcggcaagtctggcttcatcaacaaagaaggcacccgtcctgccgtggttatcccgaccaacgaagagctggtcatcgcgcaagacgccagccgtctgaccgcataattccacatcgccagccctgacccgcaataattcgagctgcaggaaggcggcgacacagcaaaaccccggccgcgtacagcgcgtacgccaccggggtgagcaagtagagccaacgcacgtgcaacttgaaatatgacggatagctggcggtgctgttttgtatcccgcctgatactggcggtaacgaaagaggatataccgtgtcccgtactatcatgttaattcctaccggtaccagcgtaggtctgaccagcgtcagcctcggtgtgatccgcgctatggaacgcaaaggcgttcgtctgagcgtctttaaacctatcgcccagccgcgttccggtggcgatgccccagaccagaccaccaccatcgttcgcgccagctcctccaccaccaccgccgctgaaccgctgaagatgagccatgttgagtctctgctctccagcaatcagaaagatgtgctgatggaagagatcattgccaactaccacgcgaatactcaggacgcggaagtggtgctggtggaaggcctggtaccgacccgtaagcatcagttcgcccaggcgctgaactttgaaatcgccaaaacgctgaacgctgaaatcgtcttcgtgatgtctcagggcaccgacacgccagaacagctgaacgagcgtatcgaactgacccgtaacagctttggcggcgccaaaaataccagcatcaccggcgttatcgtcaacaaactgaatgcccctgtcgacgatcagggccgtacccgtcctgacctgtcggaaattttcgacgactcgtcgaaagcaaaaatcgtgaagattgacccggctcagctgcagaaaggcagcacgctgccggtgctgggcgcagtgccatggagcttcgatctgatcgcgacccgcgcgatcgacatggcgcaccatctgaatgcgaccatcatcaacgaaggcgatatcaatacccgccgcgtgaaatccgtgactttctgcgcgcgcagcatcccgcacatgctggaacacttccgccctggttctctgctggttacctccgcagaccgtcctgacgtgctggttgcggcctgcctggcggcaatgaacggcgtggaaatcggcgccattctgctgaccggcggctatgaaatggacgcgcgcatcagcaagctgtgtgaacgcgctttcgcgaccggcctgccggtatttatggtcaacaccaacacctggcagacctccctgagcctgcagagctttaacctcgaagtaccggttgacgatcacgagcgtatcgagaaagttcaggaatacgtggccaactacatcaacgccgactggatcgaatcgctgaccgcgacctccgagcgcagccgccgtctctctccgccagccttccgctaccagctgaccgagctggcgcgcaaagccggcaaacgtgtcgttctgccggaaggcgacgaaccgcgtaccgtgaaagcggcggcgatttgcgccgaacgcgggatcgccacctgcgtcctgctgggtaacccggatgagatcaaccgcgtagccgcggcccagggcgtggagcttggcgccggcattgaaatcgtcgatccggaagtggttcgcgaaagctatgtgggtcgcctggtcgaactgcgtaagaacaaaggcatgaccgaagcggtcgcgcgtgagcagctggaagacaacgtggttctcggcaccctgatgctggaacaggacgaagtcgacggtctggtatccggcgcggttcacaccactgccaacaccattcgtccgccgctgcagctgatcaaaaccgcgccgggcagctcgctggtctcctccgtgttcttcatgctgctgccggaacaggtttacgtttacggcgactgcgcgatcaacccggacccgaccgccgagcagctggcggaaatcgctattcagtccgctgaatccgcgattgccttcggcatcgaaccgcgcgtggcgatgctctcctactccaccggtacctccggcgcgggtagcgatgtcgagaaagtccgcgaagcgacccgtctggcgcaggaaaaacgtcctgacctgatgatcgacggcccgctgcagtatgacgccgcggtgatggctgacgtagcgaagtccaaagcgccgaactcaccggtagctggccgcgcgaccgtgttcatcttcccggatctgaacaccggtaacaccacgtacaaagcggtacagcgctctgccgacctgatctccatcgggccgatgctgcagggtatgcgcaagccggtcaacgacctgtcccgtggcgcgctggtagacgatatcgtctataccatcgcactgaccgcgatccaatcggctcagcagcagaagtaatctgccgctgtagtcaaagcaaaaggcagccgaatggctgcctttttgtcgtcaggaggcgagcgacgattgctgccgcgcgtttgcgatctttattcgcgctcgctctcttccgcatcatcatactcattaccggcgttgcgggtcatccacagcgccagcgctttcagggagtccggcgtgaactcatcgcagcgggcggtgatctcttccggcgttaaccagcacacctcgctgacctcttcttcctgcagggcgaacggcccgtgggagacgcagctgaacaggcttccccagacgcggcagaatttgtcttcgtaataaaactggccgtgatcggcaaacggcaccccggcgatgcctaactcctcttccgcctcgcgacgggccgattccagcagctgctcatcagcctgcacgacgccgccagcggtggcatccagcatgcccggatgaaagtcttttgtctcggtgcgtcgctgcaccagaattttccccattccgtcatgaacgacgatataggtcgcccggtggcgcaggcactgcgcgcgcatttgctcgcggctggactgtgctatcacctcattgttttcattaacaatatcgacccattctgtgcttgccaaatgattctgttccgccatcaggaaaccttactttaaatgcgctctcgcggcgcgtctttatgattgagggctaaattacgggtaaattgcaacctctgcaataacctgattatcattgagtgctaaaacctgcagccgcccctgatccagcagcccatagctggcggaatatccccctttcgggatactcactgagccgggattaaagaggtaaattgcgccgcgtttttccgcgaccggtatatgagtatggccatatgccaggacatcgccagcggccagcggcggcagattatccggactatagagatgcccgtgggtcagaaacaggcgatagcgttcgctaagcacctgctgccagggcgcggtcattggaaaacgaagcagcatctgatccacttcgctgtcgcagttgccgcgaacggcaacaatgcgttccgccacgctgttcaaccgctccgccaccttacccggcgcatacccctcaggcagcgcgttgcgcggaccgtgattgagcacatcgccgagtatgatcagccacctggcgccgctttgcgcgaaccgttcaagcacgcgttccgtggcgggcagcgaaccatgaatatcggaggcaaacatcagcttcataggttccatctccactggttacgatgcctctatgatagcggaagcgcggcgggttatcagcctcagcgtttggcggaaagcgccacgtaacgctggattgaggcccgctgccactggaaagacgcataatcagccagcgcctccggtaccttatcgccattgagaaccaggcgattgagcatcagcgccaggtctgcgtcggcaatagaccattcgccaaataaattttgcccgccgtgggccagtagcatggtggcggtggcaaacagcttttccgcagattgcctgccggcctcgctgaggtccggcattttcgccccgtcaaacaccacggcggtggatcgctcttcacgaattggcatcagatcgctgcgcagccaggcctggatctgccgggcgcgggctcgtttttgcagatcatgcgggtagatgcgctcccactccggcggcgcgaaacgctcatccagatactcggtaatcgccgaagactcacttagcgcgaaatcatcaacctccagcagcggtacgcgacgggtggcggcatagcctgtccagcccgcctgcagatgttcgccgcggttcaggtcgacggttttaagggtaaaaggcaggcttttttcctgcagagcgacatagacagacatcacgtacggtgagaaaaaatcggcatcggaccacagggtaatgacaggctgactcatagcttcctcaagggtggtagacaggacaataagccaacatagcctgtcttacaggcgatgtcactgctcgagcgcggacgactcgtcgcctggctgccgggtcgcttgcggaatttctcccgagtggcgcagcttcacctatactcgaacagtttgcgacccacgacggcgggaaatattatgatcgatctttactatgcacccaccccaaacggccacaaaatcaccctgttcctcgaagaggcggagctagcctatcggctaattcgggtcgatatcggcaaaggggaacaatttcatccgcagtttctggcgatttcgccgaataataaagttccggctatcgtcgaccacatgcctgctgacggcggggcgccgttgagcgttttcgagtcaggcgccatcctgctctatctggcggaaaaaagcggtaagctgctgagcggcgagctgcgggaacgctacgtcacgctgcagtggctgttctggcaggtcggcgggctggggccgatgctggggcaaaatcaacatttttcccactccgcgccgcaaaccgtgccctacgctattgaacgttttcaggtggaaacccaacgactgtatggggtgctaaatcagcgtctgggatgcagcccgtggcttggcggcgaccactacagtatcgccgacatcgccgcctggccctgggtgaactgccatgtccgacagcgtatcgatctggcgaactatccggcggtgcacaactggtatgagcgcattaagcagcggccggcaacgtcggaagcgatgttaaaaattcagctttattaaccccctgctcgcccgtcgcgctttgttgtatgattgcaggacttacaccacggaggaagcctgcaatgtctcaaccagacgccattattcgtattaagaacctgcgcctgcggacttttattggtattaaagaggaagagatcgccaaccgccaggacgtggtagtgaatgtagccattcactaccctgccgataaagcgcgcgacagcgaggacatcaatgatgcgctgaactatcgcaccattaccaagcgcataatcagccatcttgagaatggccgtttttcgctgctggaaaaattaactcaggatgtgctgaatatcgcatgcgaacatcactgggtcacatatgctgaagtggagattgataaacttcatgcgctgcgctatgccgactcggtgtccatgaccatgagctggcgtcgctaaccatgtcagggaggtggtatgaagatcctgcttactggtggtaccggcctgattggccgacatctgatacccagattgctggagctcgggcatagcgtcacggtctccacgcgacatccggataccgcccgcgcccgtctcgatccgcgcgtcaccctgtggcgcgatttcgagggccatcaccacctcaatgatattgatgccgtcatcaatctggcgggtgaacccatcgctgataaacgctggacggccgagcagaaacaacgcttgtgccatagccgctgggatctcacgcagcggctggtgggcctgatccacgccagcgacacccctccctccgtgctgatcagcgggtctgccatcggctactatggcgacctcggcgaagtggtggtgaccgaagaagagccaccgcacaatgagtttacccataagctgtgcgcccgctgggagcaaattgcctgcgaagcgcaaagcgagcgcacccgcgtctgcctgctgcgcaccggcgtggtactggctccgcggggcggtattctcggcaaaatgacacccgcctttaagctcggcctcggcgggcctatcggcaatggcagacagtacctggcctggatccatatcgacgatatggttaacggcattctgtggctgctggataacgatctgcgcggtccgttcaatatggtttctccctacccggtgcataacgagcagttcgcccatgcgctgggtcatgcgctccatcgaccggcgattttccgcgttcccgccgccgctatccgcctgttgatgggggaatccgccgtcctggtgctcggcggccagcgcgcgctgccaaagcgtctggaggccgccggctttgccttccgctggtacgatctggacgaagcgctaaaggatgtgctgagttaatggctgacacaggggagcattggctcccctgattccattctgctggctcatgctccacgcctggatggcctcaccctggcgctgcagcatcgccatattcaggacaaccagcgcccttaatcgcctgaattcaccgccagccggccggttcgccggtgttacctggcaaagcaaagtgctaaggtaggcttttctttctgcgtattgactgctttatgacgaccatcaccacaccacgcctttcgcttacccgctttgttaccgatgactggcccttttttctgcgcctgcgccaggatccgcaggtgatgcgttttatgggggaggtgttaagcgaggaggtgctgcgcagcgtcttcgtcagtcgctgtgccgatcccggggtgtttgtattgcgcgataaattcggcgaggcgctgggcgatattgggctccgcatcagtccgaaaaatccgcacgaagctgacgtcggctacgcgctgctgcctcaggctcagggaaaaggctatgccagcgaagcgctgcgggcggtctgcgagtatggtttcaccaccctgggggtgcaggccatcaatgcctgggtgctgggtgaaaaccgtggctcatcgcgcctgctggagaagcaaggctttgtgcgcacccaggtgctggagaaagcctatcatctgaacggcgtcgattacgatgactggatctatcggctggagcgggaagctcatccggcgtccgcagacgccggatgagccgattatttcagcgaacctttcagaaactgctgcaggcgcgggcttttcggcgcgccaaacagcgcatccggatgcccttcttcttcaattttaccctgatgcagaaaaatgacatgtgaagagacgtggcgggcaaagcccatttcatgggtcaccaccaccatggtttttccctcttccgccagctgctgcataatgcgtaacacttcgcccaccagttccggatccagcgcggaggtcggctcatcaaacagcagcacttccggttccatcgccagcgcgcgggcaatagagacacgctgctgctggccaccggaaagatgcaccggatacttcgcctgctgacgttcgtctatcccgaccttggccagatattttaccgcccgttcgcgcgcttcctgtttgcttaagcccagcacctgaatcggtgcttccatgacgttctccagcaccgtcatatggctccacagattgaaatgctgaaacaccatggtcaaccgggtgcgcagcaggcgcaactggttcttgtcggccaccttcagctggccgtctttatcccgtaccagaccaatattttggccgctgacgacgatcgtgccttcgctcggtttttcaaggaagttaatacagcgcaaaaaggtactttttccggagcccgatgaaccgatgatgctgataacgtccccggctttcgcctgcagcgagacgcccttcagcacctcgtgttccccatagcgtttatgcagatcgataacgtttaatttattgtcggacatggcgttctcaatgcgtcgaagaaggtttgatatgctgcaaccagcgcttttccgctttacggaacaagctaatcagcacatacgagataattaaataaagcaccgcggcgatgccaaacgcggtgaacggctgataggtggccgagttgatatcgcgggcgattttcagcagatccggtaccgtagcggtaaacgccagcgcggtagagtgcagcatgaggatcacttcgttactgtaggccggcagtgcaatccgcagcgcggaaggcagaataatgcagcgatacagtttgactgacgagaagccgtaggcccgcgccgcttcaatttctccggcgggtactgagcggatcgcgccggcgaaaatttcagtggtataggcgcaggtattcagggttaacgccagaaccgtgcagtttagcccgctgcggaaaaaagcgttcaacagctccgtgcctttgacgatttccagggtatacatgccggagtaaaaaaccagcagttgcacatacagcggcgtgccgcgaaatatgtaagtgaacagccagatggggaactggataaacttattgctcgagacgcggccgatggccagaaacaccgccaggatgccccccattaccactgaagagatcagcaaccataaggtaatcgccacgccggtaaagcgatagccgtcggtccacagtagtgatttccagtactcctgaataatttcaatcacaggtcagccctcttcacgccaacggtatagcggcgttcgagcagcagcagtacgccattagaaacggtggtaaacaccagataaatcaggccgcagacgatggcgaagtagaacggctgccaggtgcttttcccggccagctgcgtggctttgaccacatcctccagccctagcaacgagaccagcgccgtcgccttgaggataacctgccagttgttgcctatccccggcagcgcgtagcgcatcatcgccgggaagagaatacgccggaacgtctgcccgccgctaaagccaaaggcggtggccgcttcgatatgccccttcggcaccgcaaggtaggcgccgcggaaggtttccgtaaaataggcgccatagataaagccgagggtaataatcccggcgatcatcggatcgatatcaaactgggccatgcccagcgcgtcggtaacgctgtttagcgcaatctgcaggccgtagaaaatcagcagcatcagcaccagatcgggcacgccgcggatcagagtggtatagccttcaaacaccagcgccagtggacggttgctcgataactttgcgccagcgcccgccagcccaatcaggacggcgagaacgaccgagctgagcgcaagctccagggtgacgagcgcaccctgcaaaataacctgtgaaaacccatacagcatgctgcctaccctgtctgtcattcaccattgcgcgcgaaacgcacgcaatggcgaggcgtgagaattattcgccgtatacgttaaaatcgaaatattttttcgccagcttgtcgtaggtgccgtccttacgcatctccgcaaacgccttattcagcgcttcacgcagttcgttgtcttccttacgcagccccataccggtgccaacaccaaacagtttctcgtctttgattgacgggccaccaaactggtaatctttaccaataggctgtttcaggaacccttcgctggccgcgacctcatcctggaacgcggcgtcgatccggccggcggtcaggtcggaatagatattgtcctgcccctgataggagacaatttcgatacctttcggcgcccagtgctcattgccataggtttcctgagtcgtcccctgcagcacgcccacgcgcttacccttgagggtggcgagatccggcgttaccgggctgccctttttcaccaccagacgcgaatctgccgcatacagcttgtcagtgaaggcaatttcctgctggcgcttttcagtaatcgacagcgaagacataatcgcgtcgattttcttcgcttttaaggaggggatcagcgcatccagcgggttttcaacaaaggtacattgcgtattaatacgcttacacagctcttttgccagatcgatatcaaaaccgaccaattctccctgcgcattcttcgattcgaagggagcataagtcggatcggtaccgatacgaattttttgcgggatggcggcaaagaccgtggaaacgctggaaagggccagcgctaaagagagagacaacgccagttttttcataactatcctcgacagactgtcattctaacgggtttattagaactatttacgccagttatcgtgccattattcgccccttaagggcaaagatttatgcaccagaaaggccgattttttgcatcagaaacgcttaactatgcattttttagccaaaaaactggctgcttttgcactgaaatgatccacagcgcgtttagatgcacccttttggggcatggatacgaacctggcggcaggcccaccccattgtgcgggcctgcagcagtcttagtcgccgtacacgttaaaatcgaagtatttcttcgccattttgtcgtaggtgccgtctttacgcatctcgcccagcgctttatcaaacgcggctttcagctcggcgtcgtccttacgcaggccgataccggtgccgtcgccaaagtactttttgtctttaacggacgggccggcgaaggcgaaatctttcccggcaggctgtttcaggaagccttcgctggcggcgacttcatcctgcagcgccgcatccagacggccagctgcgaggtctgaatagatcagatcctggttctggtaagccaccacgtcaacgccctggctgcgccagcggtcgttagcataggcttcctgagtagaaccctgcagcacgccgacgtgcttgcctttcagcgcctccagcgtcggctggatcggcgaccctttggcggcgatcagacgcgagtcagcggcatatagcttgtcagagaaggcgatctcttgctggcgcttctcggtaatagagagggaagagatgatggcgtcgattttcttcgctttgagggaggggatcagggagtcaaaatcactgccgacccaggtacatttcaccttaattcgggagcacaactcattgcctaaatcgatatcaaaaccaacaaagtcccctttcgcgtctttcgacgaaaatggcgcataggtcgcgtcagtgccaatgcgaatgctctgcggcagagcagcaaacacgctggccgtgctgctcattcccacgagtaaagagagagccagaatcgtcttcttcatacagtacccttaagtgtcgtgatgtggtgcgttgcttgttatggtgattgccgatcaatcctgcagtttttgtgccatcttcccggtgcgtgccgggaacagggttaaatttgttaaaataaagttgcaggattgtcttaaaagggaagataccagcattactggcgaaaccgcagcgcctgagcgcaaaaagacgaaataaatgtcgaggatttgatcgcggcaacaaatttgcaccaccggagcgcaagcgtacatttcatgcaccactatagtgcgacactaggccccctgccagcgggtaaacaagtcgtgctccagactaatatcaaattgatcgagtacccgattgacggtctggttgatgacatcgtccaggctttgtggccggtggtaaaaagccggtaccggcggcattatcaccgcccccagctctgcagcctgaaccagcagacgcagatggcccaaatggaacggcgtttcccgcacgcagagcaccagcggacgacgctctttcagcacgacatccgccgcccgggtcagcaggccatccgtatagctatggacaatgcccgagagcgtcttcattgagcagggtaaaatcaccatcccggcggttttaaaagaaccggaagagatactggcggcgatatcgcgggcgtcatgcaccacatcggctagcgcctgcacctcacgtacggagtagtcggtctccatggccaacgtctggcgcgccgcctggctgaggatgagatgagtttcaatatccggcacatctcttagcacctgcagcatccgcacgccgtaaatggcgccgctggcgccggaaatgccaataatcagtcgtttcacgttctgttaccccttgcgcgtgtgccgcagactttgccggattatagcctctggcgcaactattgacgcacagttaaggggcgaaaaaaagcccgccgtcctttaggtacggcaggcccgcgacgcgtgaacggcttaaccctcgttgtgcatctcgaggttttcgacttcgttttgcagctggaccgctttggcatcatcgttacgcagggagtcaagatagtcgaggtactgctggtcgacatcccgggtcacatatacgccgttgaacaccgagcattcaaactgctgaatatccgggttctccgcgcgcaccgcgtcgatcagatcgttgagatcctggaaaatcaggccgtcggcgccaatgatctggcggatctcatccacttcgcggccatgggcgatcagttcgttggcggtcggcatatcgataccgtacacgttcgggaaacgaatttccggcgcagcggaggcgagatacacttttttcgcccctgcttcacgcgccatctcaatgatctgctccgaggtggtgccgcgtacaatggaatcatcgaccagcagcacgttcttatcgcggaattccgcacggttggcgttgagcttacggcgaacagatttacgacgcagctgctgaccgggcatgataaacgtccggccgacgtagcggttcttcacgaagccctgacgataaggtttgtcgagaatgcgggcgatttccagcgcgatgtcgcaggaggtctccgggatcggaataacgacgtcaatatccagatcttcccactcgcgggcaatcttttcgcccagcttagtccccatgttgacgcgggcgctgtagacggaaattttgtcaataaacgagtccggacgggcaaaatagacgtactcgaacaggcacgggttgctgaccggattatcggcacactgacgggtatagagctggcccttctcggtaatatagaccgcttcgcccggcgccacatcgcgcaggaattcaaaaccaagcgtatcaagggccacgctctccgaggccaccatatactcggtgcgaccgtcgccaacgtcacgtttacccagcaccagcggacgaatgccgttagggtcgcggaaggccaccatgccatgcccgatgatcatcgccacgcacgcgtacgcgccgcggatcaggcggttggtcgccgcaatcgccgcgaagatgttgtccgcttccagcgggtagtgacggaagttatccagctcactggcgaaaatattgaggaggatttcggaatcagaggtggtattgatatggcggcgtttttcttcaaacagctttttacgcagctcgtgcgcattggtcaggttgccgttatgcgccaatgtgatgccatacggcgagttaacgtaaaacggctgcgcctcggaggcgctggagctgcccgccgtaggataacgcacgtggccaatacccatattgccctgcatacgctgcatgtggcgggcctcgaatacgtcgcttaccagcccgttagccttacgcaaccggaagcagttgttggcatcaatggtgatgatgccagcggcatcctgtccacggtgctggagcaccgttagcgcatcataaatcgactggttaaccggcataacaccggcgataccgacaataccgcacatacgtcttttcctcgttcagcaacgacccaaagtctatactttaggcaagaaacttgacgagctttgcaggtattcaaaaaaccatctgatgacgggggtaaaatagggaataaactgcgactgatgccagtcatcgctcttcgccatcccggtaaaggtgtccaggaagaacaggatagcggcgatgatcagcaccccacgtagcgcgccgaagcagatccccaataccctgtcggttcctgacaaaccggtcttctccaccagctggcctatcacatagttcacgatagcgccaacgatgagcgtcacgataaacagcgccgcaatagcaatcccatttcgaacccgttcatcctcaaagcccgtaaaccagacagacaggtcagcgtagtaatggctggcgacataaaacgcgcaaccccacgtgactaacgataaagcttcgcgaacaaagccgcggatcaggctgaccaggcaagaaagacccagcaccgccataatggcgtaatcaatccagaccatatacgtcccacgatttacgccctgtcgtccagttcggggcgcattctaacagaaaaagaaaacgtttgcgtagggatttccatgccctacagaaataaaaatggcgctgaaaaaacattcaacgccagactgcctttcgcctcttcagggcggctgagacagggtttgcggggcgtttctccccgccacgttctctccgcatggcggaaaaaacaatcagttcggggtgaaacccatcaccaccccgctaagcccggaaatctgctgcagatcgcccagctggcctttcagcttgtcttttgacgcatccgggccgacgaggatgcgggtaattttaccctgtaccggcgtcgaaggcgacgtatagactttgaaacccgaggcccgcagtttaccgacaatctcattcaccttatcggcgttcttcaacgcgcccagctgaaccacataggctttgccggtcggcgccggcagggccgcctgctgctgcgatggctgttgctgctgtggcttagccggcggcggcgttggcgtcgcggcctgctgttgcggctgcggtttcggctgcggcttgggctgcggtttcgcggccaccaccggctcctgaacgtcatcgaagctgttgctgttcaccggaatacgcgatggatctaacgatggcgcggcggcatcgcccgcccgcacctcttccgccgccccttccggcggttgcgaaggcaacgcctgggttgccgccggcaacatatccggttcatcgcgatcgcctggtttcggtaccagcgggatcgcggcaaactcatcctggtaatgctttttctgcccgtccagcagccctggcaggataatcacccccagcgccaccagcacgattgtcccgactaaacggttctgaaacttactcgccaccgattctccccgcgtctatctcttccataacctgcgctacggtgtgaaacgaaccacacaccagcacggtatcttccactttagcgtcagccatggccgcacgccacgcctgcgccacgctgctatagactgtaccgcagcgcaaatgttccaccagctgctctgccgtcgcgccgcgcgggccttccagcggcgcgcagtaccaggcatcgacttccggggccagattggccaacgtgccggcgatatccttatcatgcagcataccaataaccgccagcacgcgtcccgttttcgctaacgttttgagacgcccggcgagataggccgccgcgtgcgggttgtgcgccacatcgaggatcactcgcggggcgtcgctgattatctgaaagcgtcccgggagcatcgcatcgcggatccctgcgcgcaggatagcgtcatccacggcaagcccgctggcgcgcagcgccgccacggccgtcgccgcattcggcaacggcacctgaggcagaggcaggtggcttaacgcccctgccgtatcgcggaaggaccacgtttcgccctccacctcatagcgccagtcgacgccgcggcgctggagcagcgcgcccttctcgctagccacttccgcgatggtgagcggcatatccggctcccccaccaccgccggtttaccggcgcgaaagatgcccgctttttcccggccgatactttcgcgatccgggcccagccagtcggtatgatcgagggcgatgctggtgaccaccgcgacgtcggcatccacgatgttggtggcgtcgagacgcccgccgagcccgacctcaaggatcaccacatccagctgcgcctgcttaaacagccacagcgccgagagcgtgccgtattcaaaataggtcagcgagatgtcaccccgcgccgcttcgatttcagcaaacgaagctgtatgcgccgcctccggcagttcagccccctgaatgcgcacgcgttcggtgtagcgcaccagatgcggagagctgtagacccccactttataaccggccgccatcaggatggtttccagcgtgcggcaggtggtgcctttgccattggtgcccgcaacggtaaaaacgaacggcgccggtttaacgatatccatctgcccggcgacctcgctgacgcgcgccagcccaaggtcgatggttttactgtgcagatgttccagataagaaagccacgtagccaggggcgacgtggcctgaggaataggatctttttccatgatgcccgtaagaattgacggttaacgcgtatgaataaaaaagggcagcgccgccaggccctgccctctgctttatcaggcctcaggttcctgatccggtgccggcggcaccaccacgccttcatgaggcgcttccgaaacggcaaccggcgccggcaggttcatcagcttcgccagaatgctggccagcttgagacgcatttccggacggcgaacgatcatatcgatcgcccctttttcaatcaggaactcactgcgctggaatcccggcggcagcttctcgcgtacggtctgctcgataacgcgaggaccggcaaagccgatcagcgctttcggctcggcaatgttcagatcgcccagcatcgcaaagctcgccgatacgccgcccatggtcgggtcggtcagcacggagatgtacggcagtccgcgctcctgcattttcgccagcgccgcggaggttttcgccatctgcatcagcgacatcagcgcttcctgcatacgggcgccaccggaggcggagaagcagatcagcgggcagttatcttccagcgcctgctccaccgcgcgcacaaagcgtgcgccgacgacggaacccatcgagccccccataaaggagaactcaaaggcggcggcaaccaccggcatcgcgtagagcgtacctttcatcaccaccagcgcgtctttctcgcccgtctctttctgagcggacgccaggcggtctttgtatttttttgaatcgcggaacttcagcacatcttttggctcaagttcgctacccagttctaccagagaaccttcatccaacaggctatgcaggcgattacgcgccgacatgcgcatatggtgatcgcacttaggacaaacctccaggttgcgctccagctcggcgcggtagagtacctgaccgcagctgtcgcacttggtccatacaccctcaggaatgctcgccttgcgggtgggagtgatgttgcttttaattcgttcaatccagctcattgataacctttctgcctgaacctggtcgatgccagttttgtcgtaaggggcgcataatgccatttttgcctcttacagaccatgaatgttgcacattaaatcatatcatcccggaacatgggataaaaaagtggtcaaaccgctgcgcgtgacgctctgcaccgccacgcgcaacacaggctaaactacttcgcctgcttcgccgccgcccgcttgtggcgaataatctcaatcacgcccggcaggacggaaagcacgatgatcgccacgatcagcagcttcaggttctcctgcaccaccggcaaatcgccaaacagatagccggcataggtgaacagcagcacccacagcagcgccccaaccacgttataggctgcaaaatgacgataggacatatgccccattcccgccacaaacggcgcgaaggttcggactatcggcacaaagcgcgccaggataatggttttcccgccgtgacgttcgtaaaagctgtgggttttatccagatagctgcgacggaatatctttgagttcggattgctgaacagcttttcgccgaacagccggccaatggtgtagttgaccgcatcgccgacgatggccgcgatgaccatcagcagtaccatcaggtggacattgagatcgttggttggcaaggccgagagcgcgcccgcgacgaacagcagggaatcgcccggcaggaatggcgtcaccaccagcccggtttcgcagaacagaatcaaaaacagaatggcataaacccagacgccatactgggcaaccagttcggcaaggtgcacatcaatatgcaggatgaaatcaattaaaaagtgaatcaagtccatgtttgtctttacccttaatgaccctattagtccgccagaaacagcgggcccattggcagcaccggtaaatcatagtgggccgggtaatccaccgacaccagatacaacccttccgcttttgccgttgccgcagcgagcgtcctgtcttttgctgccagcagttctgccatccagctctccggctggtttccggccccgacctccatcaggctgcctacaatattcctgaccatatgatgtacaaaggcattcgctttgatatccaccaccacatacgcgccgtagcgggtaacgttaatatgcatcacgttgcgccacggggtacgcgactggcactgtaccgcgcgaaacgaggtaaagtcattctctcccagcagacactgcgcggcgcgctgcatacgctcggcgtcgagcggctggtgaaaatgcgtcacgccatgacttaacaccgccggacgcaggcgatgattatagatgacgtagcgatagcggcgcgccgtggcgctgaaccgggcgtgaaaatccgccggtacatgtttgacccaacgcaccgcgatgtcaccaggtaaattcgcatttacccccagcgtccaggcggcatctttccgctgcgcccgggtttcgaaatgcaccacctggccggtgccatggacgccggcgtcggtgcggccggcgcaaaagacggtaatcggttcgttcgccacctgcgagagcgccttttccagcttctcctgcacgctgcgcacttcgttttgccgctgccagccgtaatatttgctgccgtcgtactcgatgcccagcgcgattttacagatcggctgttgctccatctcagacatcagtacaggtactcctcaatcagcttctcggcgatcttcaccgccatcagcgcgccgccgaagcgcacgttatccgctaccgaccagaactggatctgctccggcataccgtaatcgttatgcacgcagccgatggagaggcgggcattgcctgaggcatcaccaacctgagtcgggaattcgccctcttcagaaagttcgatatcctcgccgcgggtaaaagcgtcgcgcgcctcctccgccgccagcgggcgcatcgcttcgaagctcaccatctgcgcatggccgtagaagaccggcgactgaacgacgctggcggagatcatcagcccgtcatcctgaagaattttgcgcgcttcatcgacgatccggcgctcttcgcgcacgctaccttcacgatccggcagcagcggcagcatgttgaacgccagctggcgaccaaagaaatcgtcttcatcgatagggatgccgttcagcagcttagcgctctgacccgccagcgcatccaccgcttttttcccctgccccgaggcggagagcaggttagtgacgctaatgcgcgacaacccgccctgatcgatcagcggtttgagcgccgtcaacagctgactggtcaggctattaggcaccgcaatcaggttgcggttgcggtaatcgcctaatacgaacgggttcacgtccggcaccaccagcggtacgtccggctccagcgcaaacaggccgctgagatcgataaccagacacccggcgttggtcgcttcttcgacatacgctgcactggcttcgacgccggcggcgaagaaagccagctgggcctgggtccagtcaaattcggcggcgtctttgacgatcaccgacttgccaccaaaacgcagatgttcgcccgcgctgtcgttgcgcgccagagcaaaaatctctcctaccgggaactggcgttcagcaagagtttcgagcagggcttcgcctacggcgcccgttgcgcccagtacggcaatattccagccttcagacatggtggttaactccagaaataaagcggccccgccggagtatccggcaggggcattaagaagacattaacgaacaggatgatgcacggcgttaaaaccgagctggcgcaacagcgtcgccgcctgctcatcgctgcactgcacatacagcgaagaccattcgcgacgttcctgataatttttacgcagcttgtcgaattcaccggcgacgccggccaccttccgcagcggcgcatcatcgcggcgcacatcatacaccaagtggaccagtcttttcagcgtcggctgatcgagcggtccatgcagggtaatgcggccaaattccggcgccggcagcagagtgtccagcgctacctgctgcggatggccgataaaggcgctgtaggcttcaaaaacctgcgtcgtcccgcgcgctttcccttcgagggtgtagccggcgatatgcgcggtaccgatatccactcgcttgagaagctcaacgtttagatccggctccggctcccagacgtccaataccacactcagcggctgaccagcttccagccgctttagcagtgcggcgttatcgaccaccggcccgcggcaggcgttgatcaaaatcgttccaggcttcaggcggcttatcagcgcctcatccgccagatgcagggttttatattgcccttctttatacagcggcgtatggaaggtgatgacatcggcttcctggaccagcgcctcgagggagcggaagtcaccttcgtcgccgcgatcggcgcgcggtgggtcgcagagcagagttttgatccccaacgcttccaggcgcttttgcagtcgcccgccaacgttaccgacgccgacgatcccgacggtgcgatcgcgcagcgcaaagccgtcgcgttcagccagcatcagcagcgatgaaaagacgtactctaccaccgcaatggcgttacagcctggcgccgcagagaaaccaatccccgcctgctgcagccacgcctgatcgacgtgatcggtgccggcggtagcggtgccgacgaacttaatggccttgccggcgagcaatgcttcattgacccgggtgaccgagcgcaccattagggcatccgcatcggtcagggcatcggccgggaccggacggcctgggatcgcctgcacgtcgcctaaacggctaaaaagctcacgggcatagggcatattttcatcaacgaggattttcacagttcagtacctgtctgagaacgagagttaactggggaagtgtgccataatctggccgccaggcatactcatcacctggttccagcaccgcgatatcgaaaggatgaatcatgacgcacccccttgctgatatgccagaccgtcctccagggcgaggcccatcaggcactgccgccaccggcgaaccttcgctttccatgcagcaacgcaccgttctggagcgactgatcacgcgcctggtggcgctgacctcgcagcagaacgcggaagtgtgggcctgcgtcaaacatgacctcggactgaaaggcgactcgcccctgctggcctgccatttcagcgccgcggaggccagtctcaaccagcgcttagccgccgctcaggataatcatcatcatcgccagaccttagcgcagctcagcgatctgctcggtcagggcaataaccgccaggcggtgagcgattatattcgtcagcattatgggcaaacggcgctgcatgcccttagccagacgcagctggagaccattctgcatctgctgcagcatggccagctgtcgatcccgcagccgcagcagcgcccgccgaccctgcgcccgctgttgccagccgagcataatacgctcaatcagctggtgactaagctggcggccgctaccggcgaaccaagcaagctgatttggcaatccatgctggagctttgcggcgtcaagtccggggagctgatcccggcgacgcacttcctgccgctttcgtactggctgcaggcgcggcaaacgctgagtgcgcaaagcgtgccgacgctcacctcgctgcagggagcgctcaagcagccgctggaggccgcggagtggcagacaattgtcgacttcgccagtcgcagctggcaggtcacgccgcggaccacgctgagcccggcgcagatcctggcgctgctgaacaaggtgtttgtgctgcgggtggcccgcgcccaggagacgctggccatcccgcaggaggagcctgtcgccaggcggacgtggagcgctaagccgtggcagctggcgctgggcgcggttgtcctgctccttgtgctgtggctcctgctgtagcccagcagccaccggcggcgtttacggctccccttcatgccaaacgctgcggtgtttcctacagcgatttcaggccggacaataacctagcggcgaaatgagataagggtgacgaggatccccagcgccgcgcagagggcgccggcaaggaacaccgacgagtagcccagcgaggtcgccagcaggccggtcagcggcccggtcaggccataggagatgtcctgaaaggccgcatagccgccgagcgcggtgccgcgcacctgcgccgggacgcgcttcactacttccacgccaagtgaggggaaaataagcgaacagccgcacccggtcagcgccgcaccggccagcgccagccaggcattcggcgccagtcccagcagcgtcagaccaaccgcctctatcagcagcgagaccatcgccaccttaacgccgccaaaccgatccggcatccagccgaacagcactcgcatcagcacaaaggcgccaccaaacgccgtcagggtaaagccggccattggccagctatggctggcgaaatagagggagacgaaggtgccgatcaccgcaaagccgacaccctgcaggcccaggccaatgcccggccgccagatcatgccgatgacgctccagagtgaaggccgctcgcctccgtgggccgccactttgcgcacggtaccgttaataagccaggcgacgagcggtagtcccatggtgacacaggccagcaccgccacgccaaaatggctatagatcaataatcccagcggggcgcccaccgccagcgagccgtacatcgccatgccgttccatgacatcactttgccggaacgggccggtcccaccaggcccatcccccagctcaggtttccggtcagcagctggctttcgccaaacccgaggatcaagcggcccagcagcagcaggccgagcctggcgagcaccggcagcggcagcagcgcagcggccagccatgccgcgcccgccagggcgcaggccagcatcccctgcaggacagagcgtttagcgccgtactggtctgccagacgtccggcgtacccccgggtcagaacggtggcgaggaactggatccctaccgccacgccaaccacggtgttgccaaatcccagctcctgatggacaaagagtgggatcaccggcagcggcaaaccaacggtcatataggtcaaaaagacggcaaacgtaatacggaaaagcgaaaaattcgccgaagaattggatgttgtttcagtaactgcggacatgcattactccagattcgcagagtaaggcgagcaaagcgacacgccccctccacctgattatcagggttaaggcgcgttggttgacgttaaacgcttacgcattagtggagagactaatggatccgcgagcagtgtgcctgcgggctcttaccctgtcaagatgacaaaaaaggggagccggtggctcccctttgcgcatcacatgctgattaggcgttgtatttacgcatcaccagcgtggcgttggtgccgccgaagccgaagctgttggacattacggtggtcagcttagcgtccgtcggtttggtgacgatgttcaggccggcagcctgctcgtcgagctcttcaacgttgatgctcggcgcgataaagccgtgctccagcatcagcagggagtagatggcttcctgtacgcccgccgcgcccagcgagtggccggtcatcgctttagttgccgaaatagccgggctgttgtcgccgaatacttcgcggatggcgcccagctctttcacgtcgccgaccggagtggaggtaccgtgggagttcagatagtcgatcggcgtatcaacgccatgcatcgccatctgcatgcagcgcactgcgccttcaccagacggggcgaccatgtccgcgccatcggaggtcgcgccatagccgacgatttcggcgtagatgtgcgcgccacgcgccagggcgtgttccagctcttccaccacgaccataccgccgccgccggcgataacgaagccgtcacggttagcatcataggtacgggacgctttttccggggtgtcgttgtatttagtggacagcgcgcccatggcgtcgaattcgcaggccatttcccagcacagctcttcgccgccgccggcaaagacgatgtcctgtttgcccagctggatctgctctaccgcgttaccaatacagtgggcggaagtggcgcaggccgagctgatggagtagttaacgccgtgaattttgaacggcgtagcgaggcaggcggaaacgccggaagccatcgctttggtgaccacatacgggcccacggctttcagaccacgcgggctacgcatggcatcggcgccgaagacctggaatttcggggaaccgccgccggagcctgcgatcaggccgacacgcgggttattctgatatgcttcaggcgccagacctgcgtcggcaacagcctgttccatggacaggtaagcatagatggaggcgtcgctcataaagcgcactactttgcggtcaatgaggccagtggtatccagtttgacgttgccccatacgtggctgcgcatccctgaatctttaagctcctgagagaaagtgatccctgaacgtccttcacgcagagatgccaggacttcctgctggttattaccgatgctggaaacgatgcccaagccagtaatcactgcacgtttcattaaatacctctgtaagtcgcactattttaagtttcgtgtcgcacaatagcgtacacttgtacgccgaacaagtccgatcagacattttgtgtataaatttgcgccctcaggcacacatcgttaagatcgtgctacgccttgtgattcgagtaacttacgtgaaacaaaacgccatacaacccgccaacctggaattcaacgctgagggtacacctgtttcccgagatttcgacgatgtttacttttccaatgacaacggtctggaagagactcgctacgtttttctcggcggaaatcgcctgccggagcgcttccccagccaccctcgcccgctgatgatcgtcgcggagagcggcttcggcaccgggctcaatttcctcaccctctggcaggcgtttgacgtttttgttcgtgataacccggacgttaccttgcaaaggttacatttcatcagttttgaaaaatatccgctgaaggctgaggatctccgcctggcgcaccagcgctggccagagctggctccgtgggcgcagcagctgcaggcgcaatggccgtcggccttcggcgggtgccatcgtctgctgctcgacggcgggcgggtgacgctcgatctgtggtttggcgatatcaatgagctgaccagggagctggatgattcgctgaaccagcaggtggacgcctggtttcttgacggctttgccccggcgaaaaatcccgacatgtggactcaggatctgttcagcgccatggcgcgcctggcgcgacccggcgggacgctggccacctttacctccgccggttttgtccgccgtggcctgcaggaggccggctttaccatgcgtaaaagcaaaggcttcggccgcaagcgggagatgctgaccggcgagatggcgcaaacgctgagctttcctgcgcgcgtcccctggttcgctcgcagtagcagcgatgcccgcgaggcggccatcatcggcggcgggatcgccagcgccctgctctccctggcgctgctgcgccgcggctggcaggtgaccctttactgcgccgatgaggctccagcgcagggcgcctccggcaatcgccagggcgcgctgtatccgctgttaagtcagcacgatccggcgctggcacgcttttttccggccgcctttaccttcgcccgccgaatgtatgacgcgctgccggtgatgttcgatcaccaatggtgcggtgttacccagctcggctgggatgagaaaagcacgcataaaatcgcccagatgctggcgctgaatttacccccggacatcgcctgcgcggtgacggcggaacaggttgccgggctgaccggcgtcgataccggctgcggcggcatcacctatccggccggcggctggctgtgcccgcagcagctcaccgccgagctgctggcgctggcggccacgcgcggactgcacgtgcactatggttatcccgtcgaaacgctcagcgcggagggcgatggctggctgctcaatcagcagcgctatcatcaggcggtggttctggcgaacggccaccgcatcactggttttgcgcaaacagcccaactgccggtctacccggttggcggccaggtcagccatattcccaccaccccgcggcttgccgccctgcgccaggtgctgtgctacgacggctacctgacgccacagaatccgcaaaatcagcagcactgcattggcgccagctaccaccgcgggaaaaccgacaccaccttcagcgaagaagatcagcagcacaaccggcaacggctgatcgactgcttcccgggcgcggagtggccacaggacgtggatatcagcgccaacgacgctcgctgcggcgtgcgctgcgccacccgcgatcatctaccgatggtcggcaacgtgccggactacgcggcaacattgacgcaatacgccagcctccacgaacaaccggatatcgccgatagcgcgccggtctgtcgtaacctgtttatgcttggcgcgctcgggtcgcgcggactttgcaccgcgccgttaagcgctgagctgctggcggcgcaaatgagcacggaaccgctgccgctggatagcgacaccctggcggcgctgaatccgaatcggctgtgggtgagaaaactgctgaagggaaaagcggtgaaataaaaccatgagggcaggcaatttcccgggtacggctgacgcctgacccgggctacaacatggctcaggcctgatttttcgcctgttgatacaggttatgccacatcccctgcaccagaatttggtccggcggcgacagttcgccagcgctgatggctttctccaggctctggctaactctgctgtgtaccgcgtcagcagaatgctcgccctcaccttccagctcagccaccgccagcgtcaggtggccgcgcagataaccgccggcaaacagttcatcatcactggcgtggtctaccatgttgtcaatcagcgccagaatgcgtgattcaaactccgcgatcatcatcttacctcttgtcatgtaatgtgcggccttagtgcaggtcttccggccacggaaagtgtttcgccgtcaatggcggcgtttgataatagtgttgtaacgcgcgaataaagcgcgccggacgttcggggatcccttgttcaagtaaagtcatcacccgagcatgcacccggcgctggaaggcgatgcgatcgggctcaacgtccccttccagattgtcacagctgacgttaaacggaaatcccgccgccacgcagaacagccactcaaaggcctgcggtttcacctcgacatcctcaaactggctttgggtcatcgcatcgcggccgtccgggcagtaccagtagccaaaatctacttgttcgcgacgcgccttgccggcgacacaccagtgagagatctcgtgcagggcgctggcaaaaaatccgtgcgcaaacacgatacggtgatagggcgtttcatcgtcagccggaaggtagatcggctcatcgtcgcctttaatcaggcgggtattaaattcttcggcaaagcagctgtcgaaaaggtctatcagctgctgataatggtgttgctgttgcattaatgaattcccaaccactgcaaaatctcagccccgtggctgtcataaagaagtttcgcgctcatcaccgccgagacgataacgatcatcggccggatcagcgactgccctttactcagcaccagccgggacccggcacgggcgccaataaactggccggccatcatcacaaagccggtggcccagataacctttccaccgatgataaacagcagcaggccgccgacgtttgaggtggcgttcagcagcttggcatgggccgtcgacttggcaaggttaaacccggccagagtgacaaaagccagggcgtaaaacgaaccggcgccggggccgaaaaagccatcgtaaaaccctacgctaccgccggcgaccagcgcaaacggcagaccgtaaagccgacgctgccggtcggcttcgcccagtttcggcatcagcaggaaataaaggccgatgccaatcaccagcaacggcaggatctgcttcagaatatcggattgcacgtgctgcaccagcagcgctccggcggttgagccgataaaggtcatcagaatattcagcttctgatcggccagattaaccaccttgcggcggacaaaatagagggtcgccgatagcgacccgccgcaggcctgcagcttattggtcgccagcgcctgggctggcggcatgccggccgccatcagcgcagggacagtcaataagcccccgcctcccgccagtgagtcaataaaaccggccaggatggcgacaaagaagagtaccaccagcaccagcggcgatacggcaaacaactcgataaaactatccattacagcacatgctcatccagtagcgcctggcaggaaggcggcagcggcggcgtcttcttcacagggggggtagacccgggtttaggtggttcgaaccagctctgcagctccgctccgcagccatcgccgggcggcggcggcgcctgatcctcgcactccagacttcccgccgggcaacgcagtcggacgtgcatatgagcgcgatgctggaaccagggacggactttacgcagccactggcggtcgctgcccgcgtccaggcacagctgctgtttaatcgccgggttgacgaagatgcgggtaacttcgctatcttccgccgccagcttgataagctggctgatttgcgggctccatagcgacggcaccacatgcttgccatcgctggcgaccaggtccagcgcctgcggcttcaacagctgggacgatgtccagcgcgtttgcggcagctgaaggaagatatcgacatcgaggcccgtctggtggctggcgtgcccgccgttaaagcgcccgcccgccggcatccccatgtcgccaatcagcacggttcccattcctttattgtgcacctgattactcaggcgctgaataaactgaaccagatccggatgaccgaagtagcgacgctgatcggtacgcatcacctgatagccgggggcactcagggggagcgcctcggcgccaacgatacagccattggaaaacgcgccgattgactgggcgctgccgccgatcggttgggttattttctgccatggcgtggcggccaggctaccggcgctagccaacagcgcaagcagtgcgataacggtgtttttcatggttaccagcgtggaattgtcgtcgtcacgtcgccattctgcgcgcgctgacgcataaagtgatccatcagaacgatcgccagcatcgcctcagcgatcggtacggcgcggatgccgacgcacggatcgtgacgccctttggtgatcatctccacttcttcgccaaagcggttaatcgtatgaccgggaacggtaatactggaggtaggcttcagcgcgatgttggcaacgatctgctggccgctgctgatgccgccaagaatgccgccggcgtggttgctctggaacccggctttggtgatctcatcgcggttttcgctgccgcgcagcttcaccacctcgaagccgtcgccaatttccacccctttcacggcgttgatgctcatcagcgcgtgggcgatatcggcatccaggcggtcgaagaccggctcaccgaggcctggcggtacgccgtcagccactaccgtcactttcgcgccaatggagtcgccctcttttttcaggccgcgcatcagttcatccagggcgtcgattttatccgggtccggacagaagaaggggttctgctcaacctgatcccaatctttgatggccagcggaatatcgcccatctgcgtcaggcagccgcgaatgacgatgccgaacttcgcggcaaggtattttttggcaatcgccccggccgctacgcgcatcgcggtttcgcgcgcagaagaacgaccgccgccgcgatagtcgcgcagaccatacttttgctcgtaggtgtaatcggcgtggcccggacggaacagatctttgatcgcgccgtaatcctgcgaacgctgatcggtgttctcaatcagcagaccgatactggtcccggtggtaacgccttcgaagacgccggagaggattttgacctgatccggctcgcgacgctgcgtggtgtaacgcgaggtacccgggcgacgacgatcgaggtcgtgctgcaggtcggcttcggtcagcgggatgcccggcggcacgccgtcaacgatgcagcccagcgccagaccgtgcgattcgccgaaggtagtgacgcgaaagagttgtccaattgtatttcctgccatcacggctccaatctttttcgttatgttggcgtgttgtttttttagtctttataaataccgaagtgcgcacgggcgtcaatcagctgctgtttggtcagcataaagaccccgtcgccgccgttatcaaactcaagccaggtaaacggcacatccggatactgctccatcagatgtaccatgctgttaccgacttcacaaatcagaatcccgtcgtcgctgagataatccggcgcgttgccgaggatacggcgcgttagcttcaggccgtcgcttccggaggccagccccagcaccggctcatgctcatactcttccggcagatcggccatgtcctcttcatcgacatacggcggattggtgacgatcagatcgtactgcagcttcggcagatcgcggaacaggtcggaacggatcggcgtcacgtgatggatcaggccgtgggactcaacgttgtgctcggcgacggccagcgcgtccggggagatatctaccgcatcgacttccgcctccgggaaggcataggcgcaggcgatggcgatgcagccgctaccggtgcacatatcaaggatgtgctgcggcttatggttaatcagtccggcaaactggttattgatcagttcgccaatcggggagcgcggcaccagcacccgctcatcaacgtaaaactcatggccgcagaaccacgctttgttggtcagataggcgacgggaatacgctcgttcacgcggcgaatcacccgctctacaatgcgatgtttctcgctggaggtcaggcgcgcagtgcgcatgtcttccgggatatccagcggcagatacagtgaaggcagcaccagctgtaccgcctcgtcccacgggttatcagtcccgtgaccgtaccagatattagcagcgctgaaacggcttaccgcccagcgcagcatgtcctgaatggtatgcagctcattgactgcctcatcaacaaaaattttatccacgacatcctccagggcacactctgctataaattcggcggctagtgtgccatgaagacggcgataaatcagcattcttgcgataaggggcgggggaaaaaacaggttttccttgcccgaagggatattgagtcgggtaaactagcgcaaagtatgaatgagagcggacaatgaaaaagaagacatcgcttagcgaggaggatcaggcgctgttccgtcagctgatgaccggcacgcggaagatcaaacaggacactattgttcaccgcccgcagcgcaagaaaattaccgaggttgctcctaagcgtttgctgcaggaacaggtcgataacagccactatttttccgatgagtttcaaccgctactgaataccgaaggctcgacgaaatatgtccgccccgacgtcagccatttcgagctgaaaaagctgcgccgtggagattattcgccggagctgttcctcgatctgcatgggcttacccagcagcaggccaaacaggagctgggcgcgctaattgccgcctgccgccgcgagcatgtgttttgcgcctgcgtgatgcacgggcacgggaaacacatcctcaaacagcaaaccccgctgtggctggcgcaacatccgcatattatggcgtttcaccaggcaccaaaagagtacggcggtgacgccgcactgctgatattgattgaggtcgaggagtggcaaccgccggagctgccgtaacggcgggctccggggggccgtcagatggcgttggccatcttgaggttgcaggggcttttctgccagaggaactcacctttgccgtcggcatccagcgtcacgcaggcgatagccgaggtggtgaacatcgggggcgtttcccccggacacagctctgagaccagataccccaccagcggcaggtgggagacaaccagcgccgtcgccacgccttcattcgccagcgcctgcagataggcgctcaccattcccacatcaccgcacggcgtgagctccggcatcacgtcgacatgtttcggcaggttcatgcactccccaacaatatccagcgtctgttccgcacgcagatagggactgacaagaacgcgctcaatatccactttttgacctttcagccaggttgccatctgacgagactcatcacaaccgcatacggttaatggacgaaccgagtcactggctgcatcgagggcagcgtcgccgtgacgcataataaaaacttgcatattgcaccgcttttgttaaccagaagcaccgtagtttggcctgcgaagacaatacgcaggtgacccggtggccgggcattgtgcctgatccattccacgaatgaaacgctgttttttacctcaatggcgtaagtatagtcaatcattgtttacaaaacagccaatcaacagcgtcgtccgcagccggatttaccttctttgaccacaacttaggtcagccgttcatccgctggccaaaaggtggtcccctgttcagccatgcgtaataaagtgtcacagggtgtaaaacgtgggccgaactgggcggccaggcgctgcaggatcgcggcaacttcacccgcgccgatagtatccatataccggaacgggccgccaagaaatggcggaaaccctataccaaagacggcgccgatatcgccatcgcgcgcgctccggataatctgctcatcaaagcagcgcgccgcttcgttaagcatcatcatcacacagcgctccgccacctgctgcgcgtagagccgcgactgcgggcggccgatgccgagcagcggatagactgccgggtcgggccgttttttgcttttacgcccttttgtctcataaagatagaaaccacgattattttttctgcctttgcgatcgtccttcaaaatcgcgtcaatgatgtttgcaggcgggctaaaacgttctccaaacgcgctctccagcacggggataattttggtgccggtatcgatacccacctcatccagcagttgaatcggccccaccgggaaaccgaatttaaccaacgcgttatcaatgacttcaatcggttcgccttccaccagcaggcgcatcgcttcattgatatacggcgcgaggatacggttcacatagaaccccgctttatctgcgacaacaatcggcgttttcccctgccgtttagccagctgcaccacggtggcgatagtctgcgggtcggttcccttgtgcgggatcacctcaaccagcggcattttttccaccggactgaaaaaatgcaggccgattacctgccccgggcggctggcgtgagcggcaatatcgccgattggcaacgatgaggtattcgacgcaaagatggtctgcggcccgccgtattgttccacttcgctgaccatccgctgtttgagagccaggtcttcaaataccgcctcgatcaccacatcgcgatgagcaaagccctgatagtcggtagtgccggagatcagcgccatctgacgatcgcgctccactgggcgcagtcgacgctgacgaacctgtttattcagcagatcccagctgtactttaaggcgtggttgatgccacgcggctggatatctttaatccgcaccggcagcccccccttacaggcggtcacataggcgatccccccgcccatcaagccaccgcccagtactgcaacgcttctcagcggaccggggcccgcctcggcgccagggtcttttttcagatcggtactggcaaagaagatcgatcgcagcgcctgcgactgcgggctcattgccagttcgccaaatgcgcgcgcctcttcagcgtatccgctgctgcagccatgggccagaccattctcgacgacctgcaagattcgcttcaccgccgggtaatttccctgcgttttgcgctgcgtttgtttaccgacaaactggaataacagatggcgccccaggggccctgccagtacgcgttcacgaacaggcacctcccggctggtcggtcgtcccttcagcgccaactccaccgccgcctgcagtaaaatcgcctgcggcaccacctcgtccaccagaccggccttcagcgcctgccgcggccgcagctgcttgccggtgagcatcatatccagcgcggtgctgaccccgatcagccgcggtaaacgctgcgtcccgccggaacccggcagcaggccaagctgtacctccggcaagccgagtcgggttttttcgtcatcgctacagatacggccatgacaggccagcgccagctccagaccgccgccaaggcaggcgccgtggatagcggcaatcaccgggatcgacaggccatggatctcagccataatctgctgtccctggcgcgccagcgcttccgcctcctgcgcgctgcggcagcgggcaatcatgttgatatcagcgccggcgataaagttatccgctttggcggagataaatactacgccgcgcactgacttatcgtcacgtaactggcgtatcaatccccgtacctgactgccaaattcggctttcagggtattcattttttcacccggggcatcaatggtgatcaccgcgattttgtccgcacagacctcaagcttaaaagcggaaacagtatccattattcagcctccacgatcatcgccgcacccagaccacctgccgcgcaggccgtcaccaaaccaaatcccccgccccgtcgccgcagctcatgcagcgtctgggtgatcatccgcgcgccggtggcggcgaaggggtgaccgtaggcgatagagccgccgaggacgttaaacttgctttcatctacctcaccggtggcctgcgagcggcccagcacctcgcgggcaaagcggtcgcttgccagacactggagattggccagcgtctgcgcggcgaaagcttcgtgcatatcgataagcgtgagatccgccagcgtcaggccagcgcgctccagcgccagcggcgtggaccacgcgggccccagcagcatatcctgccagacgtcgatggcggtaaaggcgtagctgcgcagatagcccagcggcctcagccccagctctttagcccgcgactcggtcatcaggatcaccgctgccgcgccgtccgtcagcggcgtactgttggcggcggtgacggtgccatgtttgcggtcaaaggccgggcgtaacttctgataatctgcgagcgttgaatttttacgaatattgttgtcctgctcgagcggttcgcggaaagggggagcataggcggtcatcacctctgcggacagtttaccctcttcccaggctttcgctgccagctggtgcgaacgatgcgccagggcatcctgttgctcgcgggagatcccccagcttttcgccatctgctcggcggtatcgcccatccgcaatccggttgaatattcagccaccgccggggggaccggcagcaggtcgcgtggccgcagacgggaaaacagcttcagcttttggctcagcgtgcgtgccttattggcatccactagcgtgcgggccagcgttttactgaccccaatgggcaggacagaggaggagtcggcgccgccggcaataccggcgcggatggtaccggccatcaggctttcagcgacgttcgccacggcctggaaactggtggcgcaggcgcggctgacgctataggcgtcggtatgtacgctcatgccggtacccagcacaatttcccgggcgatgttcggcgcttccggcatctgcaccacctggccaaagaccagttgctcgatgacttcggcaggaatgtcgctgcgcgccagcatctcgccaaccaccatttttcctaaatcaatggccggaacgccatgaaaagccgtagcctgacgagcaaatggcgtgcgtagccccgtgacaatggcaatgcgatcgccctgacgggtgataagcggtaatgcctgactcataacactcccctgttaaccaagacaaccaagtggtctgacctgataacattcttaactaattttttacattaagccaatcggagaagcgcaaaattgcgagccaaaacacagtgaaaagaaaaggaaacgcccctaatcaggggcgtcgagggggaaggattaacgtaagcccagctggaagatcagggattctgcttcgcagctgaaaacaaaatcgatatccagctgcacaccgccgtcaacgtcagtgaaggttgggttaatttggcacggctcagattcgacattgcgggctttttcgcttaacgcggcgagcgtttgctcggcttcagcgcggttggcgaatacgcggctgtaggaggcggtgcagtcggtgttgtcaacaatcgtgccaacatccatacagcagcaaaccggggtttcatcagcgctacatttactcatcgtagatttcctctggagatgcaccttcggtgccagaaaaatgatgtgcctattttacgccctgtccccggtgagcctccagccgagaatcgctctgccggcgttaagtgacagaaatcacacttaaaaatgatctaaaacaaaaatccccttctgtcccccttgctctctccgagatttttgccagctggatcgcgtttctgttatcacaattgaaaaacttcataaacatacttgcaacaaatcatctggtcagacctatactcagcgcactggtctgatttcttggttgtaccgcagaccctacactcccgcgcttctgttacggcatgtaacatagtttaaaaaaaaataactcaatgaggttatgggcatgagccagaaaacccgctttacccaatctgcccttgcagtggctgtcgcacttgtttccacccaggcctggtcagcaggcttccagctcaacgaattctctgcatcggggctgggtcgtgcctattccggtgaaggggcgatcgctgacgatgctggtaatgccagtcgtaacccggcattaattatgatgttcgaccgcccgaccatgtcggcgggcgccgtgtttgtcgacccgggcgttaatgtttcgggcacctctcccaccggcaagagcctgaaagcagacaatatcgccccgacggcgtgggtgcccaacttccactttgtcgcgccgattaacgaccaatttggttggggggcgtctatcacctctaactatggtctggcaacagagtataacgatgattatgcggccggcagcatgggcggtaaaaccgacctgaccaccgcgaacttcaacctgagcggcgcctaccgcctcgacagcaactggagcttcggcttaggctttgacgcggtctacgccaaggcgaagatcgagcgctatgcaggcgatctggggcagattgtcgcaggctctggcgcgctgccgccggcgctggcgggccaggtagcgaagatcccggccgacacgcagatcgcccatcttaatggcaacgcgtggggcttcggctggaacgccgggatcctctatgagctggataagaataaccgctacggtttaacctaccgttctgaggtcaagatcgacttcgacggtaactaccgcagcagcctgccggcggcctataaccagatcctcggcaacttcggcctgccggcgggcaccagcggccagacgacaaatggttcgctaacccttaacctgccggaaatgtgggagctgtccggctataaccgcgtggcgccgcagtgggcggtccactatagcctgacctacaccagctggagtcagttccaggagctgaaagccaccggcagcaacggccagacgctgttctataaagaggaaggcttcaaggacgcctatcgtcttgcgctggggaccacctattattatgacgataactggaccttccgtaccggtatcgccttcgatgacagcccggtgccggctaataaccgctctatctctattccggaccaggatcgcctgtggctgagcgcgggtaccacctacgcgttcaataaagatgcctcggttgacgtcggcgtttcatacatgcacgggcagcatgttgaaattaaggaaggcccgtataccttccgttccgaaggaaccgcctggctgtacggcgctaacttcaactaccgcttctgataagcagcgcgccacaaaaaagggtgaacattatgttcaccctttttttatcattcgccgatcactgtgaatcgatatccttcagctcatcctgaatagcctgagcattcgggttgtccgccggggtcagcttaccgccgttggcgataaagtcatgacgctggaagtaggcttcacgcatcagaatgtaagggtcggaagactggcgcagcaggccgtcggaatccagcagctgagcacgtgtctcaatcccttccaccgcccatttaccgatcgacatcggccaggtcagccaggagagcaccggatacaagccatcggccatatcgccgccttcgtcgcgcaaggtaaagcttccatagaacggcaactgaacatacgggccatagccaacgccataatgcccaagcgtactgccgaaacgatgtggctcaacccgctgtagctgcggattcgccatcccggccacatcgataagcccacccataccgagaatggtgttcaggaagaagcgggtaaaatgcaccatacctttataggggtcgccctgcaggaagtagttcaccatcactgccggctcttccaggttactggtaaaattgcttaacccgttgcgcgccggctgtgggacgtagtcgcgccatgccaccgcgacggggcgaagtacgtaaggatcaaccacgttaaagttgaagttaaacatcgtgcggttaaacccttctaacgggtctgagcgcccctgcggccgatcgccagagctggaactggcacatcccaccagcaatgtggcgccaagcgcaagcgccgacaggcgataattcatagatgtctccctggtttttatggctatcgcgagttgccatccatgacggaaagacaacgcttccgcccgtaaagatgttagcgattgtaacagcacgttgaacgatgtctatatcacccaagttgttgatttgatcttagcctgggaataacgaaatcgcggggctcctattctaccggagcgacaaaaatctgacgttaccatttttgcgatttcagagtatgcccagccagacggcagggaaagccgctacgctataactatacagattgatagcgagggccacgaaatggatgaactagacaataacaaattaaaggcagaggatgacgaaagagaagtggaaagtgaggaaaatcagcgtggtgaagagatcgaagtaaatgaagatcgccttccctcgcgggcgatggcgatccatgaacatattcgccaggaaggggaaaaagagatggagcgcgatgcgctggccctgctatggtcagcgattgcggccggcctgtcgatgggggcctccctgctggcgaagggaatttttcacgtcaaactggaggggatcccgggaggttttttgctggaaaacctcggctacaccttcggctttattatcgtaattatggcccgtcagcagctgttcactgaaaatacggtcaccgccgttctgccagtgatgcataatcccaccctcggtaacgtcggtttgctgatgcggctatggtcggtggtgctggcgggcaatctcatcggtaccgcggtggccgcatgggccttcaattatatgcctatttttgatgagccaacccgtcaggcctttgtcagcattgccgaagacgtaatgaaaaacagtccgacagagatgttcgccaatgcgattatttccggctggctggtcgccaccatggtctggatgtttcctgtcgccggcgccgccaaaatcgtggtgattattctcatgacctggcttatcgccctggcggataccacccatattgtggtgggctcggtcgagatcctttatctggtgtttaatggaaatctgccctggagccactttatctggccgttcgccctgccgaccctggcgggaaatatctgtggcgggaccttcatcttcgcactgctgagccatgcgcagatccgtaacgatatgagcagcaagcgaaaagcggaagcccgcgcccaggcggcggagaaagggaaaaaggccgaccgggcataaaaaaagcgccctgagtggcgagggtttaagcagtcagacggtatggctcttactcaggcgggcaaaaaacgctatactcgtgccgccttgtccccttagttaaatggatataacgagcccctcctaagggctagttgcaggttcgattcctgcaggggacaccatataaacgttgcccgccattcaccacgatgacttaaacgccagccagaacgtattcttctcgtaatcataattagccaacgatttcagtatggttagtcctgccagaaaggaacgtgtctttgtcaatcacgcacacaataaaccgacagcaacgcgcatttctgcgtacaataccttctgactttttcagtcactagccgcgaccttttacaaccttctctggacgatacaggagccaggcgttgatatgaaacagatcaccctcagcgatatgcagcagcagagcgaagcggcagccagtgctccgcgcctgcgtgcccatcgcaattttcatcccgaactaagcgacccgatacagcgtctggccatcgccatggaacccggcacctatatccgcccccaccggcacagacataccttcgaacttttactgccgctgaaaggccgatttgtggtactgaattttgatgaccacggcgtggttacccgccgggtggtgctgggtgaaacctgcacggcgctggaaatggaggctggcacctggcatacggtgctctcgctcgacgcaggcggcatggtatttgaagtcaaacaaggcgcttatcaaccgcttgccgaaatggacactatggcctgggcgcctgctgaaggccagccaggcactgccgaaatgatggcctggtatgccatcgcgcaaccgggtgaccgcttcctgtctatgccgcaataaccacaggtaggttcgacaggcgccgcaggcgtctgtttgatacttcctgccgaccacaaagtttgccaaattgaccgtcccttttttcgtgctccgctcatactcaccttaaatattgctgctaaacaggaagaaacgcttatattcagcaaactatttttctctacgaataagagatgataagataacgggaaagagtaaatatgcggcagcaaaacaataaaaacagccaatttatcgatatattattctcaatgtgaatggattttgttaatcaggtaaaggaagtcagcagaaaaaataaatcattgtcattgatacttttgctcaccatggcgatttattttttcatcgacatacaattcttatgaatattacagaacggaatatctggaagctaaataatttaccgccaatggagtattgctctctggcgcgggcgcaaaaattattaaactgcgaactcgaagacattcttcactggcatgatataggcgcaatcaatctatgtcttaagcttaacccaacgccgggaatattaaaaatcgccgtcctctcccatcaggaaaaagaggtaaccagcgcgtttaatccatttacctcagtcgaggcaggagaaacagtctggtcgcaacactcccatatccgcagcattctgcggcttgaaggcgatattccgacgatggaaaccctgcgcggaaatacggtaacccagttcaacgtaaaggtatttgcttcagagctctggcatccacactgtcggaacctaatggcgctgctggaggcgccagatgatattcttttcgaaaaccgcctcagcatgatgctgccggataaaccatttgtttattgtcatttcattccagaggaagacgaacgcccctcgatatcattgaaccgcatctatatcaccagccaggccattgagaaaatatacgcccacagtattagcgcccggcctatggacgtgacgaaaaatccgctactggatcaaacccgttacatccagcaggaattaaccgtcctgccgcaaagtgaggtattgctggaatttatccattatcttgttcagtcccatactgtatttaatgagaagttgcagagtatggctgagccagacaagactcagctctttcatcacgtgctggaaaggcttaaggaagaaggcatgcttatagagaatgcctagcccgatgaaggcgatatcggcagcgaagccagccgtgagtcgcagttcgccggcgagtaacgtaatccttcaggcaagggactggcggttttcctgctcaatcgttatcgcattctctcgggccagggtgatgaattcgcgcgctgcggcgctctgccaggcgccctgccgctgcaataaacaggccgtgcgctgcagcagcgcaggtcttagctcaatcgccaccacatcatcaaactgtccggcgatcgccgccggcagcagcgttgctaacgttgtgcttcgaataaccgacagaacggccccgatggagttggcctccatccgcacgtctggttcgagccgatgaaggcggcaataacgatcaatctgctcgcgggtagcaaactcgctgctcagtaaaattagcggctgggcgtcgagagcctgcagttgcaagtcgcgctctcctgccagcggatgcgcacggctcaccaccagcgcaagcgtttccgtcagtagcggctgaaccacaatctcctgtgaccggcaatcgtcaaaggcaatccccacatccagttcatcctccagcagcatcgcctccatccgctcctggttcatctcctggataagcacttttactccaggatagcgtcggtagtacgcctccatcagcgggcccagcatataggtagtgaaagttggcgtcattgcaatgcggagtttaccgtgctggagatcttctgcgtcatgcaaggcgcgccgaccttcctcaagctcgcgtaacgcgcgacgggcatactccagccagatctcaccggcatcggtcaggcgaatacgtcggccagagcggtcgaaaagctgaacctccagcatcgcttccagctggcgtatctgctgtgacagcgcaggctgggagacatgcagcgccgcggcggcgcgggaaaagccacaatgttcagccacagcgataaagtaggaaagttggcgcagaagcatcggcccacctataagaaattccaataggcattatcataaataagtcttttaacttataaaacaagagacgtaccctcttcgcacgaccctcaacatatttcacctttaacatcgttttatgcaggagtgactatgtccgctcacgatcgttatcttcagcgcgcattagtgctggcaaaacaaaacattgctgacggtgggtcgggtagcagcggcacattgctgcgccgccgccccctaagaacggagcgtgcgagtttccccgcactccgctcaagcctttataagtgctttcggtgagcaccggcttccctgctgtgtaactgtcggtggcagttcggatgtaacaactcgagattggtcagttcgtcactgccgcccataactttcctgatccggtgatgtatattccatccggtctggttggttatgggttgtccgcactgcggacagtgtttcccctgcctcttccagagttgaactactgtcttcatcttctttgatttgcctttccagattagatccagacgacgttcaaagtagatttccattccgggggtgtatggtgttgcttcgcctttgatttttatatggcgctttatcggtgtttccattgcccggaagagagtcagaattttcccttccggggttatggctttaaagatccagcgcctgccttcaaaggagaagtatcgtccggcgatccaccgcaatccttttcgggggtgccttcttacacaccatcgccatatagctcgccagatttgggtgtcgacataattaaatgtttctttcgccacgacgtgtcggtgataggtagcccatccccggattaccgggtttagctggcctatcagtttccatgccgggagcgtcggattgcgtttaattatttctctgactttacagaggaagttcttcaggtttttcttcgacggtttaatcagcattttaccgttgtacttcctgacgttctgccctaaaaagtcgaagcctttatctatatgtgtaatcgcggttttttcttccgacagttccagccctcgttcgcgcatgaaagctgcaatcagtggtctgacctcattttccagcaattcacgggagctgcctgaacagatgaaatcatcagcatatctcacataattcacctggtgctttgcactgtgataaccacttttcctgaacgtttgcatcagttccttctccagtccgtccagagccatgttggcgagaacaggggatatgatgcctccctgcggtgtcccgctgttcgtatggttaaacacgcctctttccatgtaacctgctttcaaccattttttaagcagtctcctgtccatcggaatatgggaaagcagccagtcatggctgatgttatcgaaacaccctttaatatcgccctccagtatccatttgggcgatactttctggctcatccgcagaaaaatggactcaatggcgtcatgcgtgctgcgcattggtctgaaaccatagctgttatggtcagcagtggtctcggatacgggttccagagccagcagccacagtgcctgcatggcccggtccctcattgtgggtatgcccagcggtcgcgttttgccgtttgattttgggatatgtattcgccgtagtggctgtggcctgtaaccacacagattcaggctgcatattccttcccatttctccttcggtgtgtgccatatttttccgtcaataccgggtgtccttttaccggtattttcagttacacgcctgacagccacggctttgccggagaatgagcgggtgaggatgcgctgtagttctctgacctgccgccattgttgctgtcgggttgcctttgcaatccgtaactgtagctttcgcacccgggcatggcatgctttccagtctatggtgtgccagcctgtcgggtggggtatcgtggacacactgatgtgtgtattcatctcgctgatatccttttgactgctttacagcttttcatgcaattaaagaccagacggaagtctgcccgctttcgcgtcggggaacctgccccgtatcccggtcattacaaccgggcatttgctttttccgtcctcctctgcccgcaccgcctacagtgttccttacggttcacctgcctgtaaggcagcgatacgggtttaccaggttccgcttaacatacagagggtcagggcgggttctgtctcttcaccgggggtctctgcgcccatgtgctccctgtgcgcgaggtagcaaccggaccccgtaccttttggttcaggcctgtcagcatctttggcctgttgccgataacggtgtttatcaacagttcacatgtgttaacccttctgaccagccttgctctcctgccacatgatgcttgcagcaaggtaaagcccctcacggggctttacccgggctgacgcccggctctcgttgtcccgggagcttcagaccccgccgttgccggcagcgcctgtcccggtaggctacagctaatgggatagctggttttatcaatgtaaaacaatacgttaagcgacttcctgtcgcacgcgccccttcggcgccgtgctggtgcggaatgatgagattgtcgctgaaagcgtcaatacctttcatctgagcggtgacccaacggcgcatgccgaactgaacgccgttcgcgatcttgccgccagactgggaagcgcggtgttgcgcgaatgcgtcatctatgccagcggacaaccttgccctatgtgcctgagcgcgctctatttaaccggcgtgcgggaagtgtttttcgccaatagcaatcaggacggggagccttttcagctctcgaccgccgcgatttatcagcagctgcagcagccgctggcccagcaaacgctgtcgatccatcatcgcccgcagccggagggaactgaactttatcagcgctgggcggaacggcagtcatgacaccagcgctgcgacagaacctgacgctggcagtcctggtactgactgggatcaatatgcggccgctgcttacctccattggtcctttgctgccggacatccgcgcagccagcggcatgagctataccctggccgcactcctgaccgcgctgccggtgatcgcgatgggggtgctggcgctggccgctggctgggtcgatcgctatatcggtcaaaagcgcagtattgcgctgagcctgctgattatcgcggcaggcgccctgctgcgggaaatcgccccgaatagtggcttactgctcaccagcgctctggccggaggaattggcatcggcattattcaggccgccatcccggcggtaattaagcacctctttccccgacggacgccgctggtgatgggactatggtcagcggcgctgatgggcggcggcgggttaggcgccgcgttcaccccatggctggcgtcacatagcgcggcctggcatgatgcgctagcctggtgggcgctccctgcgctcctggctctgctcagctggctggcgatttgtcggcatttgcctcgcgcaccgcatcagaccagcgcttcctcccgggtcgcgattattggccagcgccgcgcctggacgctgggactctatttcggactgatcaatgccggttacgccagcctgatcgcctggctgcctccttactacatccagctaggcgacagcgcccagtacagcggttcgctgctggcgctgctgaccgtcgggcaaaccgccggcgcgctgctgctcccggcgctggctcgccaggaggatcggcgccagcttcttctgctagcgctggcgctacagctgattggcttctgcggctttatctggctgccagagcatttctctgcgctctgggccattgcctgcggcgtgggattgggcggcgcgtttcctctgtgcctggtgctggcgctggatcacgccggacaaccggcggtggccggcaggctggtagcctttatgcaggggatcggatttatcatcgccggtctgtcgccctggctttcaggcctgctgcgtagcctgagcgggaactacacgcttgactggtcctggcatgcgatctgcgtcctgctactcatggcgctgacgctgcgctttatcccggcacactacccggccgagtggcgacagcgcgcctcagacctgccctgaaccgacggcggcgcgtggcaaagataatgccgcgcgctctcgttggccttctccgcccgccccatcgctaaaacccgtttccttcgcgtcgctggcgctaaatttattaccctgtgaaattaatgtgtcgccgaatcacgacactcgtaagtaactaaaaattaataaaaaaatgcctcttgtttccctgattttttaggcgtacattagcgccatctggagcactaaacgcacagaattacgggctgctgcagggtgaagttacactggcgacagcccttgaaaaacagaacaattaattcatttgaacgtcgcacaagcgcgtggagtgatgagtcgtgaaatacttctttatgggcctctcttttatggtcatcgtttgggccggtacttttgccctgatgatctagactgcagcggtgtcaaaaaaaacgggagccttcatgctcccgtttttattttgccgtactgcccgcagcgctagctcgcggaggccagcagaccatccgcgcggaacatcgccttgataccgcggatcgcctggcgcgtacggtcccggttctcgatcagcgcgaagcggacgtgggtatcaccatagtcgccaaagccaatccccggcgagacgcaaaccttcgcttcattaagcagctttttcgcaaactccagcgaccccatggcggcgtaaggttccggtattttcgcccacacgtacatagacgctttcggacactccaccatccagccggcctcatgaagccctttgaccagcacatcgcgacggcgcttatactgttcggcaatatcgcgcacgcactgctgatcgccctccagcgcagctatcgccgccacctgcagcggagtaaaagtcccgtagtcatgatagcttttgatacgagcgagggcattcaccaaagtcttattacccaccataaagccaatgcgccagccggccatgttatagcttttcgacagggtaaagaactcgacggcgacatctcgcgcgccgggcacctgcatgatggagggcgctttccagccgtcatacacgatatcggcataggccagatcgtggacgaccagaatgtcatactgcttcgccagagcgacaaccttttcaaagaaatccagttcgacgcactgcgcggtcggatttgagggaaagccaaggatcatcatcttcggcttcggatagctctcgcggatggcgcgttccagctcgttaaagaaatccaccccttccaccagcggcactgagcgcacctgcgccccggcaatcaccgcgccatagatatgaatcggatagctggggttcggcaccagtacggtgtcgccatgatccagcgtcgccagcatcaggtgcgccagcccctctttcgaaccaatggtgacgatcgcctccgattccggatcgatatcgacgttatagcgttcttcataccagcgtgaaatggcgcgacgcaggcgcgggatcccccgcgaggtagagtaaccatgggtgtcaggccgttgagcaacggtgcagagtttttccacgatatgcggcggcgtcgcgccatcgggattacccatactgaaatcgataatatcttcgccgcgccgacgcgcagccattttcagttcagcagtaatgttaaaaacgtacggagggagacgatcgatacgcgtaaaacggcgttcaggactggattcagccataggttcctctaattaacgttagcgcccggaccgtccgagcgacgctgccgctgttgcggctcgtttagaaaataacctgaaaaaattcatgttgtcgagaggcccgttaaaaaatattcccttgcatataaaacgggtatcgactgcgctaaatgcggcagttcattggcggaataatcccgggttgtataaaagtggtaacacactgatatctttcttaacacagaatattatcgttaatggcgaagaccgccgctatcgcgatgctttttaattaatcccctttaaaaagtgtgacttttccgctttatggttccacggctggtcttctgccgtcaggttttttatcatgtccctttctggccactgacgcggcgcacccatgcacgaaatctttactatgatgctggcggtctatgatcgtgcggccctgatgcttatttgcctctttttccttattcgcctgcgcctgttccgcgaactgttgcataagtcggcccatactccgaaagagctgctggcggtgacagccattttctcgctgttcgcgctatttagtacctggtccggcgtcccggttgaggggtccctggtgaacgtccgcattatcgccgtgatgtccggtgggatcctgtttggtccctgggtgggcgcgattgtcggggcgattgccggcgtgcaccgctatttgattgatatcgacggcgtgaccgcggtgccctgctttatcaccagcattgtcgccggcctgctgtcggggttgattaatcgtaaagtggcccgcgaacaacggtggaaaatcggcattctggcggggatgatgtgtgaaactctgaccatgatcctggtggtggtctgggcgccttccctgagtctcggcgtagatattgtttcgaaaattggtatcccgatgatcctcggcagcgtctgcatcggctttatcgtgctgctggtgcagagcgttgaaggggaaaaggaggccagcgcggcgcggcaggcgaaactggcgctcgatatcgccaacaaaaccctgccgctgtttcgacacgttaacagcgattctctgcgccaggtttgcgagattatccgccgcgacattaccgccgacgcggtggcgatcaccaataccgagcacgtgctggcctacgtgggcgtcggtgaagccaactatcaacgccacgacgatatgattagccccaccacccggcaggcgattcgttatgggaaaatcatcataaaaaacaatgacgaagcccaccgtaccccggagatccactccttgatggtgatcccgctgtgggaaaaaggggtggtgaccggcacgctaaaaatctattactgccacgcccatcgcatcacttcgacgctgcaggagatggcgattggcctgtcgcaaataatctccacccagctggaagtctcccgcgccgaacagttgcgggagatggccaacaaagcggagctgcgcgccctgcaaagcaaaattaacccgcattttttatttaatgcgctgaacgcgatctcctcctcgattcgccttaatccggacaccgcgcgccagctcatttttaatctgtcgcgctacctgcgctataacatcgaattaaaagacgatgagcagattgatatcaaacgagagctgtatcagatcaaagattatatcgctattgaacaggcgcgattcggcgacaagctgacggtcatctacgatattgacgacgacgtcagctgcgtgatcccgagcctgcttatccagccgctggtggaaaatgccatcgttcacggtattcaaccctgtaaaggcaaaggcgtggtgacgatcggcattaacgagtgcggcaatcgggtacgcatcagcgttcgcgatacgggcaacggtatcgatcccgccgtggtcgcccgcgtggaagccgatgagatgccgggtaacaaaatcggcctgctcaatgtgcatcatcgggtgaaacttctctacggcgagggtttgcatatccgcaatctgacgccgggaaccgaaatcgccttttatgtccccaataactctacgccgcaggcgctgacggagtcgctgttgtcatgagcggagaaaagatgaaagttatcattgtggaggatgagtttctggcccagcaggagctctcctggcttattaacacccatagccagatggagatcgtcggcagctttgacgacggcctggacgtgctgaaatttctccagcacaacaaggtcgacgccatctttctcgatatcaatattccgtcgctcgacggggttctgctggcgcaaaacatcagccagtttgcccataaaccttttatcgtctttatcaccgcgtggaaagaacatgcggtggaagcctttgagctggaagcctttgactacatcctgaaaccttaccaggagtcgcgcatcatcaatatgctgcaaaagctgaccaccgcctggcagcagcaaaataacgctgcttcaggattagccagcgcagcgccacgggaaaacgacaccatcaatctgatcaaagatgagcggatcatcgtcaccagtattcatgatatttattatgccgaggcacatgaaaagatgacattcgtctatacccgccgggagtcattcgtcatgccgatgaacattactgaattctgcagcaaactgcccaccgcgcatttcttccgctgccaccgctcgtattgcgtaaatctcagcaaaattcgggaaattgagccgtggttcaacaacacctatgtgctgcgcctgcgtgacctggagtttcaggttccggtcagtcgcagtaaagtgaaagagtttcgccagctgatgaatctgtagagagcggaaagcaccgccatccgggctacgacggtagcccgggagaagaatgcttaaagcacctggcccagcgtctgacgcagatgcgcaccggagcccagcaggcctgggttatcatgcacaatcaggtaaaccgggatatcctgaacataagctttaaaacggcctttgtcttcaaaaccgccgcggaaaccagaggctttaaagaactccaggaagcgcggcacgatgccgccggcgatatacaccccgccaaacgtcccgagggtcagcgccaggttaccgccgaagcgtcccataatgacgcagaacagcgacagcgcccgacgacagtcggtgcagctgtccgccagcgctcgctcggtcacctcacgcggctgcaggttctccggcagtcggccgtccgatttgacaatcgcgcgatacaggttgaccagcccgggacctgagagcacgcgttctgcggaaacatgccccagctcggcgcgtagctcttccagaatgatcccttcttcttcgctgttcggggcaaaatcaacatgaccgccttcgcccggcaggctgacccaacgcttatcaacgtggaccagatgcgccacgccgagcccggtcccggcgccataaacggcgatcggtttgcccgctaccggcgcactgccgccaaactgaataaggtgctcagctttcagcatcggaatggccattgaaacagcggtaaaatcgttaattatctccagatgggcaaagccgaggttgcgcttcatttcggcgatagagaaagcccaggtatggttggtcatcgccacccagtcgccggtaatcgggcatgcgatggcgatacaaccttcgttgaccgttacctggtgctcctcgaggtagacgcgcaccactgcctccagactggggtaatcgagcccggaataggtctttgcgcgagagatctctccactcgccagatcacatagcgccaggcgggcgttggtccccccgacatctcctactaaagcaaattttgtcattccgttacggctccgctaaagtcaaaataaatcttttggcacactgtaaattcatggcggcttaacaacaacgtccaacgcgcagacgccccttgtttagcgacacaggtcacatttagtttgtaatctatgcaaggtagcctgtaaaggacgcgccggatatcagatgtcaccttaactttatcgtttcagcaccatttgcatcgacggtctccgctgacgaaggcaaagtagtgctccagcacttttacaaggacatttccatgctccatcctcgcgccagaacaatgctgatcctgtcggtgccggccatcctgataggcatcgcctgcagcctgatcctgatcgtggcgatgaaggttgccgcgctgctgcagcgcgtgctgtggagcaatctgcccgcgcagttgggggtgagcgccgacagcccgctgtggatcatcgccatgctgacggcgacaggcatcgcggtgggtctggtcattcgttacagccccgggcacgccgggccggatccagcgaccgagtcgttaatcggcgctcccattgccaccggcgcgctgcccggactcctggccgcgctgatcctcggcctcgccggcggcgtcagcctcggcccggagcatccgattatggtggtgaatatcgcgctggctgtcgctgtcggctcccgactgtttccgcgcgtcagctcgctggactggaccatcctcgcggcctcaggcaccatcggcgccctcttcggtaccccggttgccgccgcgctgattttttcgcaaaccctcaatagcagcaacgatacgccactgtgggatcgcctctttgctcccctcctcgccgccgccgccggcgcgttgacgacgggtctgtttttccatccccatttttcgctgccgatcccgcactatggtcagatgcgcttcgttgatattctcagcggcattatcgtcgccctgatcgctatcgccgtcggcatggtggccgtctggtgtctgccgcgactgcatgccctgatgcatcggttgaaaaatccaatcctgaccctcggtatcggcgggctgctgctggggatcgtggggacgataggcgggcccttaacgctctttaaagggctggatgagatgcagcagctggccttcagccagacgctaaccgccgcggattttctgcttatcgcgctggtcaaactggcggccctggttcttgcctcagccagcggctttcgcggcgggcgaattttcccggcggtgttcgtcggggtagcgctggggctgatgctgcatgctcatgttgacgcagtgccggcggcaatcaccgtttcctgcgcgatcctcggcatggtgctggtcgtcactcgcgacggctggttgagcctgtttatggccgccgtggtggtcccggatacgactttgctgccgctgttgtgtatggtgatgctcccggcctggctgctgctggccgggagaccgttgatgattgccaaacggcataccgattaaacgcggctgtttcgctcctcaagggcctgcgtcaccgcgcgcaggaaatcggggatatccattttcggcagcatcacttctaccagggtgagggtatcggaggtgatgctctccgtcatcgcctcccgcagttcagacgtctgagtgacccgccggcagcgcgaagcaacgtcaggggcgaaggcttccggcagccgctgccagtcccacagagcgatgtcattgtagcgctgctctggaccatgaatcgcccgttccacggtatacccttcgttattcagcagcagaataagcggcttttgcttatcacgcagcatggagcccatctcctgaatggtcagttgggccgcgccatcgccgacaattagcaccacccgccgctccgccgccgcggtttgtgcgccataggcggccgggagagtaaaaccaatcgagccccacagcggctggacgatcagcgatgcttcagagggcagcttcagcgccgcaatgccaaaggcggccgtcccctgatcggcgagaataatatcccccggacgcagggcgccctgcaccgtcgcccagaaatttttctgggtcaactcgccttcagcgccctcctcagcctccggcgccacgacctgaggcgtagcccactccgccgccagcggggcggaaagcgtcatcagcgcggccaaagccttatccatcggcaccccgctgaaccagtgatcgcccaccctgacggcgaagggctggatctcaatagtcttttcccgcgccagatgttgggtaaatcctgcggtgatggtgtcggtgaagcgcgtgccaatgcagatgatggtgtcggcgttttcaatcgcctcccgggtctgcggcgcgctggcaatcccgctgtaggtgccgacaaacccgctctgctgctcatcgaacaatcccttgcccatgagcatcgtcgcatgggcgacaggcgttttcgccacccactcccggagcgtcttctgcaggccataacgttgcgccaggaagtccgccagcagggaaatgcgtcggctgccccgcagcaggcggctggcatgttcgcagaacccggcaagctggttttcatccgccggagcgggctccaccagcaagcgctgggctggggcaatcgctgccgctctggcgacatcggctggcagcatcaaatagccggggcgatgatgcgtcaacatatcgcgcagcacacggtcgatttcatggcaggcgttgccggcggtcagcagcgcctggctacaggtgatctgctcgctcatgcgggcgaaatggcgaaaatcgccatcgccgagggtatggtgcagcagttcgccgcgctgctgggcgccggtagagggcgcaccgacaatatgcaataccggaatatgttccgcatagctacccgcaatgccgttcagcgcgctcaattcgccgacgccgtaggtggtcagcagcgcaccggcccctttgatgcgcgcatagccgtcagcggcatatgccgcattcagctcgttggcgcagccgacccaccccaaggcgctgtgcgcgatgacgcgatcgagaaactgtaagttgtaatctcccggcacgccgaacaagcggtcaataccgcagtcgacaaggcgatccagcagataatccccaatagtgtaggtcggttgcatatccattatcctcattttggtgcaggtgtaatttgagtattgaataagcgatccgcctgtccagatgggagctgataatggcagtgtaaagcaataattacgcagaaaaagcagtgtactccacgcagaacattgtttagtgtaaacgtatacacatcctgttttgtcggcggaggaagaatggtttaccaggcaagcaccacgcgatatcaaacgatggagtaccgtcgctgcggccgcagcggtctgcagctaccggctatttcccttggcctgtggcataactttggcgatgaaacgcgagtggaaaccagccggcagatgctcctgcacgcttttgacctcggtataacccatttcgatttggccaacaactatgggccgccgccgggctcggcggaaagcaactttggccgcatcctgaaagagtcgctcctgccttatcgcgatgagttaatcatctccactaaagcaggctacacgatgtgggacggcccttacggcgactggggatcgcgaaaatatctggtagccagtcttaaccagagccttaaacgcatggggctggaatacgtcgatattttttaccatcaccggcctgatccacagacgccgctgatggaaacgatgcgtgcgctcgatcatctggttcatcagggtaaagcgctatatgtcgggatctccaactatcctctggcccaggcgcgggaggcggtgaagatccttaacgacctcggcaccccctgcatcattcaccagcctcgctactcgatgttcgaacgcggcgtggaagaaggactgctggattttctgcagacggaagggattggaagcatagcgttttcaccgctggccggcgggcaacttaccgaccgctatctcaacggcattccggccgactcgcgcgccgccagcagcagtcgttttctgcagccggaacaactgactcctgcccgattagaaaaaattcgtcagcttaacaggcaggcggaagcgcgtgggcagaagctgtcgcagatggcgctggcctgggtgttgcgcgaagagaaagtcacctcggtgctgatcggcgccagcaaaaccgcgcaactggatgatgccgtcggcatgctgcagaatcgccatttcaccaccgaggagtgcgcggccatcgacgccatccttgcgctgtaaagcaaatgttactttagcaaaaagtgctctttcctgcgctttcggagttcgtccgatgcggcgggtctttaccggcccgtaatatcaggttaacaggccgcttacggccccgatcgtgaaggagaagagtatgttcaggtcactgattctggcagcagtactgctggccgcagggccactggtcgctaacgctggtgaaatcaccctgctgccgtcggtaaaattacaaataggcgatcgtgacaattacggtaactactgggacggtggcagctggcgcgaccgtgattactggcgtcgtcactatgaatggcgtgataaccgttggcatcgtcatgacaacggctggcacaaaggctggtacaaaggcagagataaagcctgggagcgcggctatcgtgctggctggaacgaccgcgatgaccaccgcggcggctggggacgcggcccgggtgggcgcggtcacggtcatggacatggccatcactaacaaacgaaaaggggagcccatcggctcccctttactttattcagcatcaggaatcaattaatccaccccgagcagcgaccccactattaaccagccgttcaggctcaccacaatagcgactatcgcccagccgatgcctctcacccaacgggtattcaccaggtcccccatcagcttcgcattgctggtaaatatcagcagcggcaccagggcaagcgcaatgccaaagctgagcaacacctgactcattaccaggatgcgcgtaggatccagccccagcagaatgacgacaaacgacggcagcatggtgatcgcccggcgaaaccacagcggaatatgaaagcggataaacccctgcataacgacctgacctgccaaagtgcccaccacggtcgacgataaaccggcggcaatcaggctgaggccaaagatggtcgccgccgcgtggctcagcagcggctccagcgtcatgtaggcctgatcgagatcggcgacgccggtatggccattaaagtggaatgccgccgcagcggtcgccatcatcgccagattgacgaacccggcaatggtcatggcgatcgccacatcccagcgggtcgcgttatagcgttcttttcgcgttccgccatgcagatgctgagtcagcgatgagtgtaagtaaatgacgtgcggcatgattgtcgcccccagtaccccggcggctaagaataccgcctccccgttgggcagcgtggggatcaccagccctttcgtcagaggagccagcgcgggctgggaaaagatcaactccacgacataggccacggcgacaaacagcaacaatccaccgatcaccttctccagtggtttttgcccgcgccgctgcagcatcaggatcagaaaagtcgccaccccggtcagcaccgccccctgcagaagcgacacgccgagcaccagcttaaagccaattgcggcgccgataaattcagccagatcggtggccatagcgataatttccgcctgtacccagtaaaaccagacaacaggacgcgggtaatggtcgcggatctgctcggccaggtttttgccggtggcaatgcccagtttggcagaaagcacctggatcagcatcgccatcaggttagcccacaccacgacccacagcagctggtagccaaagctggcgccggcctgaatgttagtggcgaaattacccggatcgatatagccaatggcagcgacgaaagccgggcccattaaggcgagcttcaccttgcgcgcggcgcgactactgctattctcaacgcgactgctagtcatcttctgcctctggaaatatagcctttgctatgtttcatgctatcaaaatgcgaatgattatcaagttcatttagaatggagataatgattgctgtgatagaagggaacaatagctggccggaaatcgaatacgggcgtcagaaaacgagatccagcccgctattaagagtagtacaagaatgcaacttttaaaacctttacgtaacataacaaaagtggatgttggatcactatttttgccattggtcacagttccttgcaatagtgtgcaattgatctcgttttctttaaagccgttgcatagaatgtgcacggaaatttaacctgcctcatatttggagcaactatggaccgcgtcttgcattttgtcctcgcgatcgttgtggtggctatactggccctgttggtcagccatgaccgccaaaagatccgtattcgttatgttgttcaactgcttgtcattgaagtcctgctggcctggttcttcctcaactccgatattggtctgggttttgtgaaaggattttccgagatgtttgaaaaactcctcgggtttgccaacgaagggacaaacttcgtgttcggcggcatgaacgataaaggcctggccttcttcttcctcaaagttttgtgccctatcgtcttcatttcggctttgatcggcattttgcagcatattcgtatcctgccgattgtcattcgcgcgatcggtaccgtcctgtcgaaagttaacggcatgggcaagctggagtccttcaacgccgtgagctcgttgatcctcggccagtcggaaaactttatcgcgtataaagatattctcggcaaaatgtcgcgcaaccgcatgtacaccatggcggcgacggcgatgtccaccgtgtccatgtccatcgtaggcgcttacatgaccatgctgcagccaaagtatgtcgttgcggcgctggtgctcaacatgttcagcacctttatcgttctgtcattaattaacccttaccgcgtggaagagagcgaagaaaatctgcagatgtcgaatctgcacgaaggtcagagcttcttcgagatgctgggcgagtatattctggcaggttttaaagtcgcgattatcgtggcggcgatgttgatcggcttcatcgcgctgatctcggcgctgaatgccctgttcgccaccgtgaccggttggttcggctatagcatttccttccagggtatcctcggctatatcttctacccggtcgcctgggtgatgggtgtgccggcaagcgaagcgctgcaggtgggcagtattatggctaccaaactggtctccaatgaattcgtcgccatgatggatctgcagaaaattgcctcgacgctctccccgcgcgcggaaggcattatctctatcttcctggtctccttcgccaatttctcatctatcggtattattgccggggcgatcaaaggtctgaacgaagaacagggcaacgtagtttctcgcttcggtctgaagctggtgtacggctccacgctggttagcgtgttgtccgcctcgattgcggcgctggttctgtaacagacgtcagtcatctgagccgggcaatgcccggcttttttttgcccgtcattcacccagcggctgtggtttaccgatcagataaccctgcagataattcacgcccagctccagcaagcgcgctttttgcggttcgctttcgacatattccgccaccacgctcatctgtttcgcccgcgccatctcgacaatcgatttcaccatgatggcgtccagcgggtccgtgaggatgtcgcggacgaagcagccgtcaatcttaatgatatcggcctgtagatgtttcagacgttcatagttcgcatagccggtgccaaagtcatcaatagcgatggcgcagccaaacgcgcgcaacgcttcaagattttgccgactggtgtccgcattagagaaggcctgctcttcggtcacctcaatagttataagttctggcgagacgctatagcgttgaaacagcgcgataatctgccctgcgctgttcttttgcatcagagttgcaggcagcaggttgaccgagaatcgctggccgggatgcttatggagcatactgaacaaggtctccagcaccagcatgtcaaaacgttggctgaggttaaactgcacaatcagcggaatgaatcggtcgggcataatgacgctatcgccacagcgcatgcgcgtgaggatctcatgataaccctccccctccggattctgaatcggttgcgcatagagcatcagcgcgcgatctttgagcacttgcttgacgcgcataaggaggcgcacctgctcggtagtttgatccaccaccagatcctgctcctcgtccagcgccagcacccgacgttcactgcccgcctgttcggaaagccagcttagctggcccagcatctggtaaagtccctcaccctgaccgtcatcgcggccccaggccgcgccaaactccaaatccagcggctgattgtgccagctgaactttttgtggttgaggaccgcgaccatatggttcaagcgggacgacggctccggtccatcaagcacgaggatcagttcgctgcccggtacctggaagactttatccgccgctcccagcagcggttgcagcgcccgaataatctgccgtttacagtccacccccatcatcagaccataatgccgactgagaaagtcgagattatcaatacgcaggctgcagatagcctgctgaggacagctctgtaaatggctctccagcgcgcgcaggttaggcaagccggtcagcggatcctcttccgcctggctacgccagcggcgtttgttgcggtcgctgcgggcatagatgtcggccatataaaacaaacagatagtaaaggagatcagaaccgacagcacaaaggagagtgaatactcgctttgcaccccctggagaaagtttttgttatataccaccagcaaaaaggccgagacagaccatgaaatacgcaatagcgcatggcctattcgactgataccgataaagtagacaataaaaataaccggaactaaataaccggcaataaattcagactgatacggcgcacacaatagcgttaatatcaccgccaacgcgataaaccaatatagggtaaaggagcgatattgcggtgccagccacggtaaacattcctgctgccagaaacgtcgggcgtagcgcggactgataatcatccgcattggataataaagaaacgtcgtaaaaattaatgccgcactgattaaactttggatatctattacagtataaatcaacggcatactaccaaagtaactggtaatagctaatggaaacgcaaaatattgtccggcgagatacatggtgattttcaggagcaccggcgcgaagaagccgccccagaagatccgcgcccccatatgttttgccgttggaccgcagcgccagcgcttccccaccaacagtcgcagaatagcgcaggagacaaacacggcgaacagttgacaaaaaagtaagataaacgcctgcggcagcgttaatttaatgagaaaactattggtgatggcaaacgcgagaattaatggcgcaattgcatagcggccaaagataaaaataacagaaaacatcacgctgattggcagccaggcaatataaataaggttgccgtcaattatcgtttgcggtgaaataaaacgagccagcggaatagcgactaaacaaatgataaaggccaatagagtttttttgatattaatgttaattttatcaagcattattgttaattaaaactccagaaacctcatcacgtttaatgggggaaatgttatgttgcttatttagggcaggcaaggcgaattatcaggaaaaagtctgaaattactttcgattttaattgctggagattaactgacgtaaccagaaagtgctttacatgaaacccgctaaaaacaaaaacccccgccgaagcgagggttctgaattttggtggagctaagcgggatcgaaccgctgacctcttgcatgccatgcaagcgctctcccagctgagctatagccccacaggacttctttacgaaccaaatccgctgggtgcagaatttggtggagctaagcgggatcgaaccgctgacctcttgcatgccatgcaagcgctctcccagctgagctatagccccgtaacgtaaagcgtgtcgtgttgacgggcggcataatatgaattcctcgctcaggtgtcaacggcaaaattatccttcccgattcaatcgctgaaaaagcaggcaacttgctgacattgcgagccttatcgcagtcagaagttaaacaggtcaccttttcacgtaaaaggatgctataacatgggcagctaattcccatacatttactcaggaaatagtatgctcaaggaacgaatgacacctgaagaaattgcccatctaaccggctacagtcggcaaactatcaataagtgggtgcggaaagaaggctggcaaacctctccgcgacctggcgtccagggcggcaaagcgcgcctggtccatgtcaatgagcaagtcagggagtttatccgcagcgcccagcgggtggcggagacgcccggcatctattctccccatgatagcgatctggaatcgctgctgctgaccctcagtaaagaactcacccccagcgagcagaagcagcttatgtctttgttgctgcgcgaggggatcaccgggttactgcttcggttagggatccgcgatcggtaaaccatgatgaaactgaaagataaaatgacgcccgcagagcttgccgactgcctggggctggccagacaaacgatcaatcgctgggttcgcgagaaacaatggcgcaccgaagcaatacccggcgttaaaggggggcgagcgcgactggtggttatcgaccaaccggtacgcgagtttctgaccaacatccctgccagacgccatctgcttaccgacaatcatctcgcggaatcgccaggtgcatacctggtcaatgaggcagacgcgatctggcggcaaatcacggaaaccctacagctgatgactccggcagaacagctgcagctccgcgatctgctggcccgggaagggattagcggttttcttgcccgcctcggcatcgccagtccggaataacagacaaaaaaaacggcagggtaacctgccgttgtttcagctgcgtcgccgtcaggacgccgggccttcgcgttcagcgataaaagccagcgctttattgatacgatctacgctacgggatttaccgatagcatggacagtaacgtctagcgcaggagattgccctgccccggtaaccgccacgcgcagcggcataccgactttacccatccccacctccagctcatcagcagttgcctgaatcgcgtgatggacgttttccgccgtccagtcgctaatcgccgccagcttatcgcgaaccacttccagcggctgacgcgccactggacgcagatgttttttcgcggcgtcggcatcgaattcagcgaactcttcatagaagtagcggcagctctgggccatctctttcagcgtcttgcaacgctcgcccagcagtttcaccagctcagccagctgcgggccgttgcgagtgtcgatattttcctgctcgatatgccactgcagatgcgttgccacatactccgccggcagggtattgatatagtgatggtttaaccacagcagtttatcggtgttaaaggcactggcggatttgctcaccgcgcccagcgagaagaactcaatcatctcttcgcgagtgaaaatctcctgatcgccatgagaccagcccaggcgcaccagatagttgagtagcgcttccggcaggtagccgtcgtcgcgatactgcatcacgctcactgcgccgtggcgcttggaaagttttttaccgtcatcgccgttgatcatcgacacgtgcgcataaacaggcaccggcgcattcagcgctttgaggatgttgatctggcgcggcgtgttgttgatatgatcttcgccgcggatcacgtgagtgatcgccatatcccagtcatctaccaccacgcagaagttataggtcggggaaccatcggtacggcgaatgatcagatcgtccagttcctggttgctgaactcgataggtccgcggatctgatcgtcaaaaataaccgaaccttcctgcgggttggcgaaacgcacgacgcacggctcatcgtcagcatggtgctcgtggctatggcggcagcggccatcgtaacgcggcttctcacccttcgccatctgctcttcgcgcagcgcttccagacgttctttcgagcaatagcatttgtaagcggtaccggcttccagcatctcatcgattacgttgttataacgatcgaaacgtttggtctggaaataggggccttcgtcccattgcagattcagccagttcatgccatccatgatggcttcaattgcttccggggtggagcgttcgagatcggtgtcttcaatacgcagcacaaactcaccgccgtggttacgggcaaaaagccaggaatagagagcagtacgcgcaccgccaacgtgcagatagccggttgggcttggcgcgaagcgagttttgattttcatgaattggccttacgtttaataaagatgccgatagccggcaatgtccggtggaaattatgggtcaatattctaacaccgtgggctgattcctcaatgttgttcccatcggaacgtcacggtttgccatttttgtttataaatcatgctatggcgccggtttcgcgatcgctttgtttaattttacgacgaacgaacgaattctttagaaaaggcgttgactcattttcaactctccctataatgcgactccacacagcgggggtgattagctcagctgggagagcacctcccttacaaggagggggtcggcggttcgatcccgtcatcacccaccactacttaacgtagtctccgccgtgtagaacagaaaattgagaagtgggtgattagctcagctgggagagcacctcccttacaaggagggggtcggcggttcgatcccgtcatcacccaccactttctcgccagctggattttctgtcaaaatgtgaagtaccgaagtgggtgattagctcagctgggagagcacctcccttacaaggagggggtcggcggttcgatcccgtcatcacccaccacttcgggtcgttagctcagttggtagagcagttgacttttaatcaattggtcgcaggttcgaatcctgcacgacccaccaatgtaaaaaggcgccctaaaggcgcctttttgctatgcgcggaacatggccctgccacgagtccctccgcagcaatctcccctgtcagcgctgatatagcggatcttcaaccctggcggcggttaaattctccccttcttcacgcacaatttcccataacgcctgagcggcggtcgacagcgagcgatttttcctgcatgccagcatcagctgccgctccatcaccggagtcagccgtttcaccgtcagatggctcccctgcggtaacggtagcgccagcgccggcagaacgctgatgccaattcccgattctaccatcggaaacagcgttgccgggtggccaatctcctggacgatgttcgcccggatagccagcctgctgagggccgcatcgatcagcgggcggctgccggacgcataatcctgcaggattagcctttcatcctgcagcgcctgccacggaacttctgtcaggctggcaaaaggatgatcctcccgacagagcagcaaaaatggttccgccagaaccacttcacactgaaggtctgccgccgggcccggatcaatcacgatgccaaaatccacttccccctggcggatactctccagcacccactgctggggccgatcgtgcagcacaaaatcgatatcgggataacgacgattgctgtgagcaatacactgcggaataaggtgggcggaaatcgtctgactggcggcgaccttgacggtgccgctcagctgctggcctacccgcccggcgtcgcgcagggtaatcgtcaactcatcgagcaaacgttccagcctgcccgccagctgctgacccgcctcggtgagcaccacttcgcgagtagtacggtcgagcagacggacgccggtctgatgctccagctccttgacgctatggctgacggccgactgacttaagccaatcatctcccctgcccggctgaagcttctggcccgggcgacggtgacaaatacttttaactgacgcagagagtaattcatcttttttattcatgaatagatgcaataaatcaattttatttctcaaatgaaaaaaagcacaatagcgcatctcttttcaggagcgtttatgaaacttttccgtattctcgatccgtttacggccacgctaatcaccgttgtcctgctggcctcattcttcccggcccgtggcgctttcgtccccttctttgaacatctgaccaccgccgccatcgcgctactgttctttatgcatggcgctaaactctcccgggaggcgattatcgccggcggcagccactggcgtttgcatctctgggtgatgtgcagcacctttattctcttcccgctactcggggttctgtttgcctggtgggcgccggtgaatgtcgatccgatgctctacagcggctttatctatctgtgcattctgccggccaccgtgcaatccgctatcgcctttacttcgctggccgggggcaacgtcgcggctgcggtttgctcagcctcggcctccagcctgctggggatctttgtttccccgctactggtgggggtcctgatgaaccttcacggcgcaggcggcagtctggagcaggtcggtaaaattatgctgcagctgctgctgcctttcgtgctcggtcacttatcgcggccgtggattggcgactgggtggcgaagcataagaagtggattggtaagaccgaccagacctcgattctgctggtggtttactccgcctttagcgaggcggtggtgaatggcatctggcataaagtcggtctgggatcgctgctgtttatcgtggtggtcagcctggtgctgctggccatcgtcatcgcggtcaacgtctttgtcgcccgccgctgcggctttaacaaagccgatgagattaccatcgtcttctgcggttcgaaaaagagcctggccaacggcattccgatggccaatattctcttcccgacctccatcctcggcatcatggtgctgccgttgatgatcttccaccaaatccagctgatggtctgcgcggtgctggcgcggcgctacaagcagcaaaccgatgcgcgtctcgctgaggaaaaggccaacgcggccaaagcctaacgcgctttcttcaggggctggaccagatcgctcagcccctcagttttaatcagcagggtcaacgccatcagctcgccaagatgcccggcagggaattgatccttacgcgcgaaccacaataaatactcttccgggacatcgattaagcgacgtcccttgtatttaccgaacggcatttcggtattggctatctcgaccagctgcgctttatccacgttattctcccagcagacgcatcatttcggcctcgtcaatcacctcgatgcccagctcctgcgctttcgccagcttagaccccgccgcttcgccggcaatcaccaggtcggttttcttcgacacgctgcctgccaccttcgcccccagcgccaccagacgcgctttggcgtcatcgcgcgacagctggctgaggctgccggtaaggaccacggttttgcctgcaaacgggctatcaatctcttccgccttcaccaccaccggcgcaggccagcgaaccccctccgccagcagttgcgcaatgacatcgcggttgctctcttcggcaaagaagttgaaggtatgggtagcgacgacgatgccgacatcagggactttctgtagctcctcaatggtagcctgctcaagggcttcgagagtgccgaaatgcgccgccaggcccgccgccgtcgcttctcctacctcgcgaatacctaaggcgtagaggaaacgtgcgaaggtcgtctctttggctttctcgagggcgttgactacgttttgcgcggacttcggccccatccgatccagcccggtcagtttccccgccgtcagccggaacagatccgccggggtatggacgtactctttctccaccagctggtcgatgatcttgtcgcccatgccgtcaacgtcgagcgcgcgacgggagacgaagtgcttgagcgactctttgcgctgcgcgccgcagatcaggccgcccgtacagcgggctaccgcctcgccttccacccgttcaacgtctgactgacatacaggacagtgggtcgggaagacgacatcccgggcatccgccggacgctcggaaagcaccacgttaaccacctgcgggatcacatcgcctgcccggcgaatcaccaccttgtcgccgattttcaagcctaagcgttcaatttcatcggcattatgcagggtggcattgctcaccaacacgccggcaacatggaccggctccagacgcgccaccggcgtaatcgccccggtgcggcccacctggaactccacgtcccggacgaaggtcatctgctcctgtgccgggaacttaaaggccacggcccagcgcggcgcgcgggcgacgaaacccagctgttcctgcagcgccagcgaatcgactttgatcaccacgccatcaatgtcaaagcccaggtggggacgctcttcctcgactttacgatagtaagtaagcacttcctcgggggtgtggcacagggtgacgcgatcgctcaccggcagcccccatgctttgaactgcagcaaccgagccgagtggctggccggcagctcgccgccctccagcacgcccacgccgtagcagaagaaagtaagcggtcgcttcgcagtgatgcgcggatcgagctggcgcagcgaacccgctgccgcattacgcgggttagcaaacactttcccgccggtgcggcgagcttcctcattgattttttcaaacccggcctgcgggaggaacacttccccacgtacctcaaggcgtgcaggaatattctcgccatgcagcttgagggggatggcgcgaatagttcgcacgttagaggtaatatcttcgccagtggtgccgtcgccgcgggttgccgcctgcaccaacacgccgttttcgtagagaatgctcaccgcgaggccgtcgagcttaagctcgcagcagtaggtaagatgatctgtgcttttcaggcgatcctgtacccgcttgttgaaggcgagaaagctctcttcgtcaaacacgttatccagcgacagcatcggcacttcatggcggatctggctaaaggcggtgagtggcgccgcccccaccctctgagttggcgaatccggggtaatcagctccgggtgctggctctccagctcgcgcagcttgcgcatcaggcggtcatattccgcatccggcacttccggcgcgtccataacgtggtacagatattcatgatggcgaagcgtggttcgcagttcagtcagttgttgttcgattggttccatatcacaccatcaatgataaaaaacccccgacaggcgggggttgagaaaggattgagttaacgcggaacgtcaggcgttcgcgtctttcacttcgcgaatacgatcctggtattcacgcagtttttgcggcgtcatcatgcgacgctgatcgtcaagcaccacgccgcccacttcgtcagcgatatactgcgcagactgcagcatcagcttgaagttctgcagttcatcgccgtaggaagggacctgcataaagatagtcaccccaggggtcatcatatccgccatgctgtccggattgaaggttcccggtttcaccatgttggccagactgaacaacaccggaccgctgccgtccggacttaggtggcggtggaaaatattcatttcaccaaacttaaagccggcctgctggatactgttgatcagcacttcaccgttaagctgggcgccatgatgcgcggcgacgttcatcacaatgaccgtctctttgcgctctttcggctgcggcgcggcgggctgctgcggctctaccggctgcggttccgcgacggcgggctgcgacgcggcaacaggctgtggcgcaggctgctgcggggcggctggctgcggctgagcgacggtcggcgtcaccggttgcggcgcgacaggctgctgcacaacaggctgcggctggtgttgcggttgtacgggcggctgcgcaggttgcggctgttgccagccaggctgcggagccgcatgcggcgcaggctgttgctgcggtggaaccggggcctggcgcggcggctgcggcggctggcgaaccggttcttcaggacgcgcaggctgctgcatctggcgctcgtaaggcggctggtactggtgctgcggcgactgacgaggggcttcatgctccccatgcgcgccgtgcggggcgtgagtcaccggatgaacgcggacttctcctacgccttcaacattatcatcaaagtcgtcgttttccgactcatcgtcgcgcgacttcatacgtttcagtgggcgatcgcgaaacatcgaagaacgttctttacggctggtccagaaaccatgtaccagtaaagcgattatggcgatcgcgccaacaatgattaatatcagacgcaaatcctgcatcattatattctctgttgttctaacaccttgccaccacggcaaacatttactcactaagagtatttgccgattacctcaagtgcaagtgcgtcggtcgctttcaccacataaagatgaactaaatcgtgctttttgctgttttttcgaacatttcctaactggttattgtctgacgacccgataaaataagcgagcattcacaccggatgttaaaaaaggagcaatgcctggctatggtttcatcatccgcaccgaccccgcgcagcggcgtttattatttttcgcagggctggaaactcatcgggctgccgggcatacggcgttatgtcttcctgcctttactggttaacgtgctgctgatgggcgctgccttctggtggctgtttacccgtctcggcagctggatcccctcgctgatgagccatgtgccggactggctgcagtggctaaactacctgctgtggccggtggtagtgctctcaatcctgctggtgtttggctacttcttttcgacgatcgccaactggatagccgcgccgttcagcggcctgctggcggaacagctggaagcgcgcctgaccggcgctaccccgccggacgtcggcgtctttggcatcatgaaagatattccgcggattatgaagcgtgagtggcagaagctggcctggtatctgccgcgcgccatcgtgctgttgctgctctactttattcccggcgttgggcagacggtagccccggtactctggttcctgttcagcgcatggatgctggcgattcaatactgtgattatccctttgataatcacaaggttcccttcaaaaccatgcgcgaatcgctgcgcagtcgcaaagtgatgaatatgcagtttggggcgctcaccagcctgttcacaatgatcccggtgttaaacctggtgatccttccggtggctatctgcggcgccaccgccatgtgggtcgattgctatcgcgatagacacgccagctggaaatagcggtaacaccttcacttgggggcggcaaaggccgctcccttatatcgcgcttattccttcttgcttatcattatttcccttccgcatatagatatgctaaatccttacttccgcatattctttaagcgggtatgctgatgccgtacccccaaatttcatacagttaaggacgggccatgagtaagatttttgaagacaactccctgactatcggtcatacgccgctggtacgactgaaccgcatcggtaatggccgtatcctggcaaaggtagaatctcgtaacccgagctttagcgtaaaatgccgtatcggcgccaatatgatctgggatgctgaaaagcgcggcgttctgaaacctggcgtggaactggtcgagccgaccagcggcaacaccggtatcgccctcgcctacgtggcggcggcccgcggctacaaactgacgctaaccatgccggaaaccatgagcatcgagcgtcgtaagctgctgaaagccctgggcgccaacctggtgctgaccgaaggcgccaaaggcatgaaaggcgctatccagaaagcggaagagattgtcgccagcaacccggaacaattcctgctgctgcagcagttcagcaacccggctaacccggaaatccacgagaagactaccggcccggaaatctgggaagataccgatggtcaggtggatgtgtttatctccggcgtaggtaccggcggaacgctgaccggcgtcagccgctatatcaaaaacaccaaaggtaaaaaagatctgatcaccgtcgccgttgaaccgaccgattccccggtgatcgcccaggcgctggcgggggaagaactcaagccgggtccgcacaaaattcagggtatcggcgccggcttcattcctggcaacctggatctgaagctggtcgacaaagtgatcggcattaccaacgaggaagctatctccacggcgcgccgcctgatggaagaagaaggcatcctggcgggtatctcttccggggccgccgttgccgccgcgctgaagctgcaggaagatgaggcctttaccaataagaatattgtggttatcctgccttcctcaggtgagcgttatttaagcaccgcgctgttcgccgatctcttcactgagaaagagctgcaacagtagtgccagcttgtaaataatgtgtaaaaaagcaccttttcgggtgcttttttgtggcacacgtcaaagttttacccctcctggcattgattcacctcgtagggtctggtatttaaccagcacatttattttgatgcgcgaaattattcagaagaggatttccgccagctgaatcgattttatgatttggttcaagtcttcctttcgcggcataatgtttaatgacgtgctagacgtcaatggcccgcaggtcttcgcagcgccaggcgctgccgacgccaaggccggaaacgtaacgccggcgctaacaatacaggctaaagtcgagtcgttagactagactttaggtccacaacactaaacctataagttggggaaatataatgttccagcaagaagttaccattaccgctccgaacggtctgcacacccgccctgctgctcagtttgttaaagaagctaaaggcttcacttctgagatcactgtaacctccaacggcaaaagcgccagcgccaaaagcctgttcaaactgcagactctgggcctgacccagggcaccgtagtgaccctctccgctgaaggcgaagatgagcagaaagctgttgagcatctggttaaactgatggctgaactcgagtaagttcacgggttctttttcatatcagtcacaagtaaggtagggttatgatttcaggcattttagcatccccgggtatcgccttcggcaaagcattgctgctgaaggaagatgaaattgtcatcgaccggaagaaaatttctgccgataaggttgatcaggaagtcgaacgtttcctgagcggccgcgccaaggcctccgcccagctggaggtcatcaaaaccaaagctggtgaaactttcggtgaagaaaaagaagccatcttcgaagggcatattatgctgctggaagatgaggagcttgagcaggaaatcatagccctgattaaagataagcacatgactgccgacgcggcagccaatgaagttatcgacggtcaggccactgccctggaagagctggatgatgaatacctgaaagaacgtgcggctgacgtacgtgatatcggtaagcgcctgctgcgcaacatccttggtctggcaatcatcgatctgagtgcgattcaggatgaagtcatcctcgtcgccgccgatctgaccccgtctgaaaccgcacagctgaacctgaaaaaagtgctgggtttcatcaccgatgcgggcggtcgtacctcccacacctctatcatggcgcgttccctggaattgccggccatcgtgggcaccggcagcatcacggcgcaggtgaagaacggcgactatctgattctcgacgcggtgaacaaccaggttcttatcaacccgtctaacgagcaaattgaagcgctgcgtagtctgcaggctcaggttgcggaagaaaaagccgaactggcgaaactgaaagatctgccggcgattaccctcgacggccatcaggttgaagtctgcgccaacattggtaccgttcgcgatgtcgaaggtgctgagcgcaacggcgccgaaggcgtaggcctgtatcgtaccgaattcctgttcatggaccgtgacgcgctgccaactgaagaagaacagtttgcggcttataaagcggtggctgaggcctgtggctctcaggccgttatcgtccgtaccatggatatcggcggcgacaaagagctgccgtacatgaacttcccgaaagaagagaacccgttcctcggctggcgtgccgtgcgtattgcgatggatcgtaaagagatcctgcgcgaccaggttcgcgccatcctgcgtgcctccgctttcggtaagctgcgcattatgttcccgatgatcatctctgttgaagaagtgcgtgcgctgaagaaagagatcgaaatctacaaacaggaactgcgtgacgaaggtaaagcatttgacgaatccattgagatcggcgtgatggtggaaacaccggctgcggcgactattgctcgtcatctggccaaagaagttgatttctttagtatcggcaccaatgatttaacgcaatatactctggcagttgaccgtggtaatgatatgatttcacatctttaccagccgatgtcaccgtctgtactgaatctgattaagcaagttattgatgcttctcacgctgaaggtaaatggactggcatgtgcggtgagcttgcgggcgatgaacgtgctacacttctgttgctgggtatggggctggacgaattctctatgagcgccatttccatcccgcgcatcaagaagattattcgtaatacgaacttcgaagatgcgaaagtattagcagagcaggctcttgctcaaccgacaacggacgagttaatgacgctggttaacaagttcattgaagaaaaaacaatctgctaatccacgagatgcgcggcccaaattactgcttaggagaagatcatgggtttgtttgataaattgaaatctctggtttctgatgacaagaaagacaccggaactattgagattgttgctcccctctccggtgagatcgtcaacattgaagacgtgccggatgtggtttttgcggaaaaaattgtgggcgatgggattgccatcaaaccgactggcaacaaaatggtcgcgccggtagacggtaccattggtaaaattttcgaaaccaaccacgcgttctctattgaatctgatagcggcatcgagctgttcgttcacttcggtattgataccgttgaactgaaaggcgaaggcttcaagcgtatcgcggaagaaggtcagcgcgtgaaagtcggcgatccggttatcgaatttgatctgccgctgctggaagagaaagccaagtcgactctgacgccggtggttatctccaacatggacgagatcaaagagctgatcaaactgtccggtagcgtgaccgtgggtgaaaccccggtaatccgcatcaagaagtaatgcttgctgcataaaaatggcgccgaaaggcgccatttttttataccgcgcaagttaccggtcgatagcacttctcgcgggacaagacgcgcaatccctccggggtgctctccagaattcgccgctcgctgtcagcgaccagcagttcgcactgatatccaccggccaggccgaacagcgaccgcgccacgcaggcatcctccagcgccgcctcacctgtcgtatcaaaatgaccaacaatgcgtccctgctggcggatcactaaccgatagcttttcatctgctttgctccagcggcggtaggatcaattcgtcacacccctgggcggcagtccagttcatcacctccagcacgcgctgggcagcagcctgcgtcgctgcccccagcgccagtccggaaagcaacccgctcaccagctccgcgcagaacagatcgccggttccttttaagtctgtctccacccgcgggtgaaccaccacttccactgcatcggccgtcaccaccagcacattgatcgtcgaatcggcctctcccggcgcgctggtgatcaccacccatttgagggtgtccgacagcaggcttcgcgccgcggcgaccgcctcctgccgatcgcgacagcgctggccgctcagcgtctccagttcgaacagattgggggtgatcccttgcgccagcggcagcaggtgctgacgataggcgtccgggatctcagccttgacatagatgccgctgtcgacatcgccgatgaccggatccaccagaatgcacaacccgggatggcgggcccgtacgcgcgtcagccactgcgccaggcgttcgatttgcactgcgctgcccatatagccggtggtgaccgcacgcagttcgcgcagcgcgtcgcgctcctccagcgcctgcagatacccgacaaaccactcttccggaataatgccgccatagaacgtctcataatggggcgtattactgaacagcaccgtcggcaccgccagcacgcgcagaccatgctgtttaatcgccggaaccgcgatgccgttgccgacgctgccatagactacctgcgactgcacggcgacgatatccacttccgacgcccggcttttgtcgtgaaagagcactgattgtatatcatcctgctggcccatcttttctccccccgctggacagcgggtcacgcactgattatgattcgtcctatgctaaattccattttgtcataggtcaataatgttagccggaaaaaccgccagcgaaatcttcgataacatccgccatctggtgcagagcggcgggttgcagcccggagaggttctgccgccggtacgtgaactcgccagccagcttgcagtgaatcgcaacactgtcgccgccgcctataaacggctggtgacctccgggctggccgtcagtcagggacgcaacggtacagccattaaagcgcgggacacactgccggcgctggagggaggtgacccaacgaccccgctgaacgatatctccagcggcaatccggatccggccagactgcctgatttaccccgctatctgggccagattgcccgcacgccccgcctgtatggcgatgcgcccatcgagccgcggcttggccaatgggccgaggcgtggtttgccagagagatagccgttccctttgcggtgaatctcgccagcggggcgatagacgccctggagcgcctgctgtgcgctctgctgctccccggcgacggcgttgtggtggaagatccctgttttctcagcagcatcaatatggtgcgttacgccggttttaccccctgcccggtggcggtggatgccgaagggatggatcctgacggcctggaggaggcgttacgcaacggcgcacgggcggtgatcttaaccccgcgcgcgcataatcctaccggctgtagcctgacggaaacccgggcgcatgccctgcgggaggtgctagcccgctatccgcaggtactggcgattgttgatgaccattttgccctgctgtcggccacgccatggcactcccctcttcctgcaagcacccaacgctgggcgctggtgcgctcgatgtcaaaaaccctcggaccagacctgcggctggcctttatcgccagcgatgccgctacttcagcggcgctgcgcctgcggcttaacgccggcagccagtgggtcagccatctgctgcaggacctgacgctggcctgcctgaccgacgaggcgtttatcgcctcgatgacggagactcgtcgtcactatcgccagcagaatgagaaactggcggcggcgctggcccggcacggcttcagccatgctacgccaggggatggcctcaatttctggctgccgctgccagcggcgagccagccctacgccttacgcctggcccgcgccggctggctggtccgggagggagaggtgtttggcatccgtacgccctcccacgggctacgcctgtcgctgggccgtctgagtgacgctgagatttcccgcctggcggccgatattgcgcaggccttagacgccccctgacgcaggcagtccaccgaacgtatcggggagtgatggcagctgccgacaaattaatgaaaaataaacgacagcaggctagtcttacctgcatgccctgatcgccgaggcggacaaatcgctcacaacaaggagcaccagagatgcgtcaccctgacctggcactgaaagcagtcattgaagcctgcgatcgcgctatctcgcaggaagattacgataccctgatgagttattacgcagaagacgccgcgctggtcgtcaaaccgggcatggtggtcagagggaaagagaatatccgcaaagcctttatcgccattgccgactatttccagcaccgactggtggtgactcaggggaaaatggaggttattgaaggcggcggcaatgcgctggtgattatggagacccggctggatatcccgacggcggacgggatatcccaggttacgcgacgcgccacctatgtctttcagaagcagggcgaacgctggctgtgcaccgtcgataactcctacggcaccgacctgcttgatgattaaatgcccgccccctggctaaagtgttcttcgccgaagacgccggtggaaaggtaacgatcgccgcgatcgcagacaatcgccaccaccaccgcgccaggattttcgcgggctatgcgtaacgcgcccgctaccgcgccgcccgaactgacgccgcagaaaatgccttcccgcaccgccagctgacgcatggtgttctcagcatcctgctgatgaatatccagcaccgtatccaccagcgaagcgttaaagatccccggcatatactctgccggccagcggcggatcccgggaatactgctcccctcctccggctgcaggccaacaatggtcaccggtctactctgttcacgcagaaaacgtgacacgccggtaatggtgccagtggtccccatactggagacaaagtgggtgatacgccccgcggtctgctgccagatttccgggccggtggtggtgtagtgggcgtaggggttatccgggttgttaaactgatcgagcagtttgccttcgccgcgctgggccatctccagagccaggtcgcgggcaccctccatcccttgctctttgctgaccaggataagctcggcgccgtaagcgcgcatcgcggcccgacgctcctggctcatgttgtcgggcatcagcagcttcatccggtagcctttcagcgcggcgatcatcgccagcgcaataccggtgttgccgctggtcgcttcgatcagcacgtctccgggctgaatttcgccgcgcttttccgcttcaacgatcattgacagcgcggcgcgatctttcaccgagccggccggattattgccttcgagtttgacccagacttcgctgccgttgtccggtcccagacgctgaagtttgaccagaggggtattgccgatggtttgttcgagtgtattcacgatttttactcaataaaaaagccgggcggcgcttcgcttacccggcctggcagacgcgtcataattccagaccgggtaagcagagcctcacccggcaaaagcacatggatttaagctatcaggccgactccgccagagcaagctcgccgcgcggctcgatacgctcggtaccgttgtacaaacgcgcgttttgcagcccgacgaacagccgttcgccgcgggacggcgcctcgtcgcccgttaacaccacgctcagcggttcgtcataccaccccagaggctggacgactaattgggtgtagtgccctttcggactggcctccaggacctgcaccggcagcggcgaatccaggctggtccgccggctgatgtccacttcccacgggcgcaggaacaggtccactggcccctggtatgccggggtatagcctaacggccagcggtgggcgccgacgtggaactgtccaccgcggatgaccccctgcaggcggttcacttcccccataaactccagcacgaaacgggtagacggctcacgccatacgcgctccggggcatcggcctgttcgatgttgccctggctcatgaccaccacccggtcggcaacttccatcgcctcttcctgatcgtgggtgacgaacacgctggtgaatttcagctcttcatgcagctgacgcagccagcggcgcagctctttacgcacctgcgcatccagcgcaccgaaaggttcatccagcagcaaaatttgcggctccaccgccagggcgcgcgccagcgccacgcgctgcttctggcctccggacagctgcgccggatagcgatccgccagatgggccagctgcaccatctccagcagtttggtcaccttggctttaatcgccgccgcattggggcgttcgcggcgcggcagcacggtcaggccaaaggcgatgttatcgaacaccgtcatatggcggaacagcgcatagtgctggaaaacgaagcccactttacggtcgcgagcgtgcatccgactgacgtcggtaccgtggaagcggatatgaccgctggtctgatgctccagaccggcgataattcgcagcagggtggtttttccggagcccgagggccccagcagcgcaaccatttgtccggaagggatatccaacgagatatcattcagcacctgggtgcgaccaaacgatttcttaatattggcaatctcaatgctcatgatttccctcctgttgcgcgcgttctttctgattggccagacgccattgcaacatactctttaaaaacagggtcagaatagccattaacgtcagcagggcggcggcggtaaacgagccgacggtgttgtaatcctgctccagtagttcaatttgcagcggcagcgacagcgtttcgccgcggatcgagccggaaaccaccgacaccgcgccaaattcgccgatggcgcgggcgttggtcagcaccacgccgtacagcagcgcccagcgaatattgggcaacgtcacccggcggaacatctgccaaccggacgcgcccagcagcaccgcggcctcatcttcatgactgccctgactcatcatcaccggcaccagctcacgcaccacaaacggacaggtaacaaagatggtcgccagcaccatgcctggccaggcgaacatgatttgcagattatgcgcgtcaagccagccgcccagcggaccgttagagccgtaaaacagcagatacaccagaccggccaccaccggcgagacggcgaacgggatatccagcaacgtcagcagcagctggcgccccggaaaggtaaaacgtgtcaccagccaggccagcaaggtaccgaacaccaggttcaccggtacggtaatcaatgcaatcatcaccgtcagccagatggcatgcagcatgtccgggttcgccaggttttccagcaccggcatcaatcctttgctgaaggcctggataaagatgtagagcatcggcaccacaaggatgaaggcggagaccagcatcccgacgccaatcagaaaccattttccccagttgatacggggcgcgtcgtagcgtttcaattgagtaacttccgccattagtgacctaccacgcgtcgaccaaagcgactctgcagggtattgatggaaaacagcagcagcagtgaggcggccaggatcaccgaggcgatggcgctcgccgccggatagtcaaactcctgcagacgaataaagatcatcagcgacgtcacttccgtcttccacgcgatgttgccggcgataaaaatcaccgcgccgaattcgccgaggctgcgggtaaacgacagagcaatgcccgccagcagcgccggcgacagctccggcagcaccaccttgcggaaactctgccagcgcgtagcgcccagcgtttccgccgcttcctcatactcgggccccaactcttccagcaccggctgcacggtgcgtaccacaaacgggatgctggtgaaggccatcgccacggcgatgccgagccaggtataggtgactttaatatcgaacttcgccagccattccccgtaaataccgttcaccgaaaacagcgaggccagggtcagaccggctaccgccgtcggcagcgcaaacggcaggtccattaaggcatccagcagcgtgcggcccggaaaacgatagcgggtcaggatccaggccatcagcagaccaaagacgccgttaaaaatcgaggccacaaacgccgacagcagcgtcaccttataggcagccaccacctgcgggttggtgatcacatcccagtactgcgcccaactcatctgcgccagctgcatcaccaacgcgctgagcggtaataacaaaatcagacagacaaacagcaggctggtgccaaggctcagggtaaaacccggcagcacgcgcttggacgacacagcaaacattacttacgccccgccgccagcagtttgtccagttcgccgccgctggcgaagtgggttttcatcacctcaggccaggagccaaacttatcttccacgcggaacagctcggtctgtgggaatttatccttcagagcatccatcactttcgggttgtttacccgatagtagtagtcggtaatgatagtttgcgcctgtggcgtatagagccagttcaggtaggctttcgccgccttttccgtgccattggctttgacgtttttatcgacccaggctaccgggaactccgccagaatgttggttttcgggataaccacttcaaatccctgcgcctcatactgcttgcgaatattgttcacttccgattcgaagctaatcagcacatcgccgaggccgcgctcggcgaaggtggtggtcgctccgcgcccgccggtgtcaaagacttcgacgttcttgagaaactgagtcataaactgttcggttttagctttatcgccgccatcagctttatccgccgcgccccatgccgccaggtaggtgtatcgggcgttacccgaggttttcggattcgggaagatcagcttaacgtcagagcgaaccaggtcgttccagtcatgaatgtttttcggattgcctttacgcaccaggaaacccatcgtcgaatagaacggtgagctgttgttcggcagacggctttgccagtcggccgggatcaggttgcctttgtcatgcaggatctgcacgtccgtcacctggttgtaggtgaccacgtccgccttcaggccctgcaaaatagccagcgcctgcttggatgaaccggcatgcgactgcttgatggtcagcttgtccccgccattgtctttcgcccactgctgctcaaaaggcgggttaagggcggcaaacagctcgcgggagacatcataggagctgttcagcagctccgtcgcctgcgcctgcgccaccagcagcatggaagccgccagcgccagatatccttttttcagtgatttaacggccattgcgcacccttatcaacgttgaacattttctgatgatcatcatatttataacgggtacgaaaggagtaacagttttatataccgtttggcgatttggaagtcgaaaagggaataagcaactggcaaagcttagctgaaagcggctcgcagattagacgggtcattgtgacaaacggcagccaggcgtgcactgtgtttatatgaaaaacacacagatatttgctcgtcagctcagacgtagcttaacgcccgcagaacgtcgaccagggtactgactgggcaaccgccgttttgctagcgatacgtttcgccgccagcgccccgttgccccctatattctcgatttcgcctgctgcgcaatacggctggcgattgaactggacggcggccaacacgatgacgccgcaccctctggcaacagagcgagggatggcgagttttacgcttctggaatattgagtttgaagagtatggtgatgcggtgatggaggggatacttgaagcgcctgagtcgccgatgccctcacccctcccctctgactgagggagagggagtaaaagaatccgcacgcagatcccatagccgcaccttaccgtcccctctcccctttggggagagggttagggtgaggggaaaaattacagcgcctggatacgctccagcgacggcgcgaagtaatacccgccggtcaccggtttggtgaagcgcagcatcgcgtcgcgtttaccgtcggtatcgccaaacatgctcagcagctgctgctcgatgttatacaggcgcgcgcagtaggcgcagaaatagaggccatgggtgccgctggcggtgccgtacggcaggctctgacggacgattttcaaccctttgccatcttcttttaagtccacgcggctcaggtgcgacgtgaccggacgttcatcgccatcgatctcttcgttagcgtcttttgtacggccgatcatcatctcctgatccggcacgctcatgcggttcagctgtttgagattatgctcccagcgctggacgaacacgtagctgccgcccgcatccacgccgtctttaatgaccgccacctcgcggcgggtttcttcccccgccgggttttcggtgccatcgacgaagccgctgaggtcacgctcttccacccagcggaagccgtggatctcttctttcacgtcgatagcgtcgccaaaggcggccagcgcggcctgcgccaccgagaagttaacttcatgacgggcggataaaatatgaatcagcaggtcatactgggtggacggcgccagccctttgccatagaccgggaaatcttttaactcatccgccccttcgccgccgctcagctgacgccagacgttattgccgaacgccaccaccgcaccgagtttggcgtcagggaatttagcctggaaggtggccacgttatcgacaaaaattttgctcgcttcgcgcagggcgttaacgtcccctttgagattggcttcaatccaaatcgccgcgcggcaatgttccggcaaaatgccgctctgaacctgagacatcgctcctcctgaaatgatgcaaccacaacgctgtcgcgttgctaacgcgccattgtaaccgtttttcagagctgtcgtgtctcttcagatcaatttagcgacgccagataatcttgctgaccttccagtttttcagcgtatcgtcggagggcatcagctcgtccggaccgctccagtggccagtgaaggcatagctgatatgctggctcccctcggcctgacactcgacgaccgccccgttgtcatggctgcctttctggcagttgccgaaggctttgctgtacaggtcgctaaacggtgtgccgattttcacgccgctggcggttttgatatccgcatcacgcacgtcaatccggctgatagcaccgttgtcgccattgatggtcagcgccacgctgttgtttttcagcgcttcaaagtagtggacgatattgcccttatcggtcttcattccgctgcgtaaacggtagtcgctgcccagcgcatcgctaatcgcctgttcattgagcggcgtggaagccgtcagtttacccactccctgctcggtcacctcggtggaagcgccaaaccagttccacggataggccgccgaccagttgactgcgctcatcgtggagcagccggtcagcgccagcggaagcgcacagagcattacacgtagcgatttcatatctcaatcctttctgagtcattcaacgcatgttggagttcacgatcggcaaaaagtgccattaaaaggtggtctggtgaaaacaggcgcccaggcgacggctggttaacagccaccacagggcatagccatccgcgaccagcagcgcaatggtcaacgaggagggagattcgccgctcagccatagcatcggctgccacagcaacagcagcacttgcgatagcaccagcagccagcgcatcgcccgccacaggcgcggcaggcgctgacgatagccgctaagcagaaaggccagcaccgccggcacgcctggcagtaaaccaagccagaagcgctcgtgatcgggatagaacagattaagaatcgcgtcgccctgctggcgcgatgcgccggccatcaaaaacagcacccacgtgcgggcctgcaacaacagcacgcaccagaaaagcaaaggcaggcgcagacggccatgggcatcaaaatcggcggggataaactcagtattcttcatcttcgatcaggcgcttgcccagggtcaggacatcggcgtactcatagcccaaccgctcgtacattccctgcaccacgtcgttgtcttcacggaccataatgttgattttcgggcagccgcgggcaatcagctttttctccagacggttgagcagcgcgttcgcgataccccggccgcgatattccggatggacgccgagataataggccgatccgcgatgaccgtcatatccgcccatcaccgtgccgaccacttcgccattcacttccgccaccagaaacaggctgacgtcgtgattcagcttgcgctcaatatccatctccggatcgttccacgggcgcagcagatcgcagcgctcccacagcgtcacaacctcttcgaaatcctgctggcgaaaaacgcgaatctccatggtattccccaccattgacggttaaaaacagtgattatggcgcgaatataactgatagccaatatcaggcgaaatcagcgacaaaaaatggcataatatgactttgtcatgtattgaaatgaaaagtaaaacaattcttattttgaatggtcgtaacggcaaacgcgatacgatataacattggacatcacttgtttacaattcaggccgaatgagcacttttaaacctttaaaaatacttgcttcgcgccgtcaggtgctgaaagccgggctggctgcgatgacgctgagcggcgtcgcctcacaggtcagcgcaaaagaacagccactgaaaacgtcaaatggacatagcaaacccgccgccaaaaaggccgggggtcgccggattgtaatgttagatccgggccacggcggcatcgataccggcgctatcggccataacggctcgaaagagaagcatgtggtgttggcgatcgctaagaacgtgcgcagcattttgcgcagcaacggcatcgacgcccgcctgacccgcaccggggatacctttatcccgctgtacgaccgcgtggagatcgcccatcagcacggcgccgatctgtttatgtcaatccacgccgatggttttaccaacccgagcgccgccggcgcctcggtgttcgccctgtcaaaccgcggcgccagtagcgccatggcgaaatacctctccgatcgcgaaaaccgcgccgatgaggtcgccggtaagaaagcgacggataaagaccatctgctgcagcaggtactgttcgatctggtgcagaccgacaccatcaaaaacagcctgacgctgggctcgcatatcctgaaaaagatcaagccggtacataagctacacagccgcaataccgagcaggcggcgttcgtggtgctgaagtcaccatccataccgtctgtgctggtggaaacctcgtttatcaccaacccgaacgaggagaaactgctcggcaccaccgccttccggcagaaaatcgccaccgcgattgccaacggcattatcagctatttccactggttcgataaccagaaagcccattcgaagagacgttaatgaaacccgatgccgcgcaggtaaaaacttttctgctccagctccaggacaacctctgtcagcagctgagcgccgtggatggcgcgccgtttattgaagatgcctggcagcgggaaggcggtggcggcggacgcagccgggtgctgcgcgaaggccgggtgttcgagcaggcgggggtcaacttttcccacgtccatggcgacgccatgcctgcctccgccaccgcgcaccgcccggagctggccggacgcagttttgaagccatgggcgtctcgctggtggttcatccgctgaacccctacgtgcccaccagccatgccaacgtgcggttctttattgccgaaaagcctggcgccgacccggtgtggtggttcggcggcggctttgatttaaccccttactacggctttgaagaggatgccgtccactggcatcgtaccgcccgcgatctgtgtctgccgttcggcgaggaagtctatccgcgctataaaaaatggtgcgatgattacttctatctcaagcaccgccaggagcagcgcggcatcggcggtctgttctttgacgacctgaacaccccggattttgaccactgcttcgcctttatgcaggcggtcgggaacggctatgctgacgcctatttacctatcgtcgaacgccggaaagccacgccgtacggcgaacgcgagcgccactttcaactctaccgtcgcggccgctatgtcgagttcaatctggtctgggaccgcggcaccctgttcggcctgcagaccggcgggcgtacggagtcgattctgatgtcgatgccgccgctggtgcgctgggaatatgattatcagcccgagcccggcagccccgaggcggcgctgagcgagtttattcaggtgcgcgactggctgtaacggccggatggcggctggccacccggtagcggagtctcttccctcacacccactggcgcaggcgatggtgcagcgtcatcgacggtttctcagcaaacagctgctgatagtcggtggcgaactgccccaaatgccagaatccccactgcatggccgcctccttgaccgtctcgcgctctgaccaggggcttatcagctcccgacgcacagcgttcaggcggatccgtttgagccaggcgttaggaccaatccccagtatcgcatggaaggcgttctgcaaggtgcgacggctgacgtacagctgctggcacagatcgagaacggttaacggctccgcgctgttttccagcacatattcgcgcgcctgcgccagcaggcggcggtagctctggtggctgacgctctctgcacttaccatcggctgcgcttcttccagcatcgtgcccatcgccagcaacagattatcccgcaggaccttacgcacggccggctgatgaagggtatccggatgctcgctaaaggtggccagcgcctgctggacaaacccccacagcgcggccttatgcggctcgcggaccgccagcgctgactggttgcgtagcatatgtagcactcgctccgggtggtgcaggaaactggcgtgacgcgcaatcacctcctgcgaaatcactaccccgagaatggtgtaatcatccggcgtgctgagctcgaactccgtaccgccgggacgggtggcgatttctgcccggcccagacactgcgagccgataaacccctgttcaccccgggtcgccggaatgccaaaccagaaggagttcggccagaccaggcaggactggcgcagcgccagcccggtatattcgcggaagacctggatctcatcgagcaggatttcggtaaactcgccgcgaaactgccccggatgcagctgatcgtagatctgttgccaggcggtaatggtcagggcgtgctcatacacatcggttgtgtgtcgttgatgaatattgtcaatttcaacctgaggcgtcagcctggtgtcttccggcaacgcctcgcaacagagatggtgcaaatttgcagaacgacgctttttcataatcgttaaagccgggggcaagccgctcccggcacctccgacaggttatggatttttgagacgatagcggctactgcgttttcgtagcgtccctgcggaaaagagctgctccagcgcctggcgggccttatccagcggccaggcaaaatgcgcggcgacctcgccggccgtcatgccctgacgaactgaagccagcagcgtcagtaaggcttccgatgaagccgggtcagctggcggcatgggcgctggcggcggtggctgaaaaccgccgatcagccgctgggtatcctcttccgggcggccaatttcccgacggctgatcacgcagccggtccgccgggcagcggcggccccagcatccagcgcggcgcggcaggccgccaggtcgccctccaccaccagcgttaacctgcccgggtcgagcacttcatgactgagcaggcgcacattggccgccttaagcatggcatccgcagcgtctacagccgcgaccatgccctccacttcgagcaatcccagcgcattgatcatcgctccctccattacacacgctgtacaggatgacgggcaatatcgagaacggcatcggtaaaggcattgcaggcggctttacaggcggcctggcttcccgtcaaaaaggcggccgaatagttggtttccgatggcggcgggacgtaggtcaccagctgaacgtcggccgacttcatcgccgcatcgataccaaacgtcgcctccagcggcggcgccaccagataagcgatcggatcgcccaacgcgatgccagcggccgatgaaagataagagccggtacgcgacaccacgtgcgccagaaacgcggtatcttgcgcgtcgttagcccactggaatgccgccccaccttcaatatgcgccatcatggcatccagcccggcgcgaacttccgccgggttcgggccgccaagcatgatcagtacttcgccggcggtaggcgacggaccatgggccgcaccggcgtagagggagcggccatagaccacctccaccatcgcctgctttgtcgcttcgtcggcggcaatatacgtcacatcgtcagaatctgccgtgatgagtccgaggctacgtatatgcgacggtaatttaagctcgcgcgcgaaaccgtcattcaccgaggcaatcacgcgcatcgcggtgaccgaggggcgaatcaaatctaatgctggcatgatgcctccttaacggctcatgttgatgccggaggctttctgctccagcatgcgtttggctaaatccacgatcaccgcggcggcttctaccggcggggtgccgccctggtggatattggagatacaggttcggtcggcctcgacggtggtcgccacccgcggggagtacaccgcgtagcaggagaggctctccgactggccgagccccgggcgctcgccaaccagcaggatcaccaccttcgcgccgaggatctcgccgatctgatcttcaatcttgacgcggccatagcgcacgaagaacggcgtcccgaccttcagacccgcctgtttcaggccggtaagcagcggcggcaggatctcttcgtagttggcggtgatggcatccgtcgacaggccatcggacaccaccacctgcacatccggatccatcacgcactgcgccttcagcgcatcaatcgcttccggactgaggcgacggcccatatccggacgcgtcaggtagaggttcttatcgctaatctcggaacgcacttccagcagcccctgcgctttcacccacgcttccggcacctctttgagcaccgtgtctttcgagcgcgagtgatcggccaggaagcgcagcagcgcctgagtgcgcggacgcgggccggcgcggccggtgcaaacgcgcgccgcggtactgcgtttcagttcagtcagtacttcggcgcggtgcggatgttgtaccccaatccaggctttcgcttccgctgagcccaggtccagcgtgcagctttccaccaccgcttcgctggcgcaggcggcatggcaggccggagtcgacgctgcgggggcctgcggctgcgactgtggttgtcccattgatgccattacgctgcgtacaatgtcttcaatctgtttttgatccatgatgtgtcatccccgcgtcatcagaagaacagtgacggatcgcccgcccgtttggtcaggcgaccatttgccataatgcccatcgtttccagccagcgttcaaactccggcgacggccgcaggcccagcagctggcgcacggtcgcggtatcgtggaaggcggtggtctggtagttgagcatgatgtcgtcgccgagcggcatgcccatgatgtagttgcagcctgcggtcgccagcaggatcatcaggttttcgttgaggttctggtcggcatcggcatggttggtatagcagcagtcgcagcccattgagatgccgctcagcttgcccataaagtggtcttccagtccggcgcgaatgatttgccggtcgttatagagatactccggcccgataaagcccaccacggtgttgacgaggaacggatcgtagtgccgcgccaggccatagttacgcgcttccatggtcacctggtcggcgccgaagttagcgccagcggaaagcgccgagccctgcccggtttcaaagtaaagacagttctccccggcgatgcggttaaactccgcccccaccgcccgcgcttcatcgagcatcgccagctcgacgccgaactctttaagccctttttcactgccgcagatgctctggaagataagccccccggcgcgccgcggcggatggcttcaatctgggtggtgacgtgcgccagcacgcagccctgggtcgggatgttaaacttgtcgatcaccccgtacaccgtatccagcacccggctcaggttctccacgtcgtcagtgaccgggttgacgccaatcaccgcgtcgcccgcgccgaaggagagcccttcatagatttgcgcggcaatactctgcacatcgtcgcgggtatcgttcggctgcaggcggcagctaaaggtccccggcagaccgatggtggtattggcttttttgatcaccggcatttttttaccgccgtagatcagatcggcgttggagcagatcttggccaccgcagccaccacctcggaggtcagccctttgcggacaaaggcgatatcgtcgctggtgacctcgtcgttgagcacgtattcccgcaggtcgctgatggtccagtgtttaatccgctgataggcggtttcgttcacgtcatcctggatcaggcgcgtaacgcagtcctcctcatacgggatcaccgggttattacggatatcggccaccgtcatatcggagagcacctgcttggcggccacgcgctgctgcgaactctccgccgctacccccgccagcacatcccccgaacgcagttcgttggctttcgccagcacctcttttacatccttaaactgataaacattgccgaacaatgtggtctttagtttcataagtcgttccctcaggaaggaaatgcgagtgatttcaccgtcaccggcacaaccgatccgccaaaaagaggcgtaccaatgtcgatatagtctcccgcccggatgctcacctcatcgatgaccgccagcggaaggtgtggaagctgtggccgcagcagcatgcccagcgctttgccaaaatcctgctcggccaccagcagcagcggacggggattgggaaagcgggcgacaaacgccagcagggcgtcaattacggtcagtaaggtggcgtagcgcaccggaagtgaagcgggaagcgccagcacgtaagcgtccgcctcgggggccagatcgagctgcgttagcgcctggagccaggcgttcggcagatcggcggcatcctgcgggatagccaccggcagattgcgcagcggcaatggaaccccctccagccagatggtgctcccggacagggacagcgtatgcgccccggcgccaatcaccgtggcgcgcacggtttgcgccgggaactgcacgttcatctcacgcaggcgcggatgctcgtgcagggccgtggccagcagcggcccgatatcggaaaagcagaaaggatcggcgggctgatggcggtagcactcccccactccgccggaaagggtaatcacctccggctgaacacccgcaggcagtacttcggtttgcatcagcccctgcgccagcggtgagagggtgccctcgatcacctcgacgatcagcgccgccatccggcgcgccacctgcgccagctgcccggcggtcagcgcctgggcgttagtgccggcgccaaacagcgcatcgacaatccgctgccccggcggatgcgcgtggaccacgcgcccctgagcgtcggtttccagcaggcggccgccgacgttgaggcaggcggtggcgctgacgtttccggcgtcaaacagggcatagttcgaggtaccgccgccaatatcgatattgagcacccggcacatccgctgccgggacagggtctgcgccccggcgccgtgtccggcaatgaccgactccagatgcggcccggcgctggcgacgacaaaatcgcctagcgactgcgagagcgccatcaccgccgggcgggcattgcgggttttcgcgctttcgccggtgatgatgatcgccccggaatccaccgcttgtggagcgatccctgcggcccggtactgagccagaatcagcgcctcaagctcggcctctttcagttctccctgtttatcaaccggcgtaaagaagaccgggctttgccagctaatgtcgcgtttgatgaattcgtagcgcggcacctgggaaaccgccgcgcggttcaccagctcgaggcgcgagaagatcacttgcgtggtggtggtgccgatatcaataccgacgctcaacagctggcgcgtgttcacgagtgcgcctccgcttcgttgttggcaggcgccggtacgttttcatcttttggcaccagcagcatcgccacgccaatcgcggtaacgccgccgaccagcttgccgacaatcatcggaaagatcatggcgttcatattggccgccgcaaaaccgagatggtcgccgagggcgaacgccgctgacaccgagaaggcgcagttgatcacttttccgcgggtatccatctgcttcatcatgccgaacatcgggatattgttcgccagggtagcgaccatgccgccggcagccatattgttgatttttaacagattaccaacgcgcatcagcggcttttcaaaccagcgggtcagcaggagcaccatcgggtaagcgccgagcagcacgcaggagatagagccaatgacttcgatggcgcgcatcacctcgccgggctggtcgccaggcgccataaagatcggatcgagccccgggatcagctcccagccgagcaggaacttgatcaccgccgccgccaggccgatggtgatcagcgccacgaggaatttggcgaagatctggaagccgttgatcattttttccggaataaacttcagccccagcgccaccagcacggcgacgatgatcaccgggatcatattcatcaggatcagcgcgaaggtaaactctaccggctggccgttgatctccaccccggaatacatcgccaccagaccgccggcgatacagccgatgggaatggtgacaatgcccgccagcacgccgagcgccagccagcggcgatcggcaggttcgataatgccgagcgccaccggaatggagaacacaatggtcggacccatcatagagccgaggatcaggcctgagtacatccaggccgccacgtcgccgcccgcgagttctttagcgaggaagaaaccgcccatgtcgcacgccagcagcgtgccggcgaacatcgacgggttggcgccgagcatctcatacagcggaataatcaccggaccaagcagatgagccagcactggcgccagggcggtcatcccgaccatcgccaggcccagcgcgcccatcgccataaacccttcttcaaactgaccgccggatccctcaatgcttttccccagtttgccgagaaagcgcgccgagccgccgaactgcgacaggatcctgtccacggcggcaatcagcataaagaacatcatgatgtacatgatgatttcgttaattcccatagcccttactccctgtcatttatgatttgtagatactgtgaataccgggacattagccgcactcaggcgactttcccgggccgcggcgtgaacgccttacccgggctacggcatagcagacggctgtgatcctgtagcccggctaagcgcagcacgagccgggaaagccacagccacacgcctccgggaaaatcggcatttatcgcgccgccgcgtacagctcgataatctgctcccggctggcggtgcgtggattggtgcgcaaacagatgtcctcctgcgccgcttgcgcccaggcgtcgtagtgcgcggacgtcgcgccagcctccgtcagccgcatcgtcagaccgacctcggcgatcagctcgcgcacggcggcgatagcctcgcggtcatcggttttcttgccggttaacgcccggccgatctggctgaagcgcgcccggcgtaccatgcggttaaactccatcaccgttggcagcagcatggcgttggccagaccgtgcggaatatgcagcgccgcccccggctgatgcgccatggcatggcatagccccagcccggcgctggaaaacgccatccccgccatgcaggaagccagcagcatattctcccgcgccgccagatcctgaccgcagcccaccgctttcggcagcgcctcgccgatcatggctatcgcccccatcgccagactgtcggtaaacggcgtggcgtggcgggcgctgtaggcctcgacggcgtgggtcagcgcatcaatcccggtcattgccgtgatatgcggcgggacgccctcggtcagcgcggcgtcgaggatcgccacatccggcatcagcgaggcatgcgccagcacctgtttgcgtccactcaccgcatcgataatcaccgtcacattggtggtttcagacccggtaccagcggtggtcggcaccgcgattagcggcagacgtggacgcaactcgctgtgctccgtcatctcccccagcgtctgctcaggattggcgaccagcagcgccaccgccttcgccgcatccagtaccgatccaccgccaaaggccaccacgccgtcgcagcgcgcgtcccgcagctgggcgacggcggcgcagacatcggtgacgcagggttcgccggcgggacagggccagagagtcatagcaatccctttcatcgccaggctacgctccagcccggcggtcattcccgcctgatggagaaaactgtcaaccatgacaaacagatgcctaaggcctcgggactgcgcttgcggaccgcaggccgccagcgcgccgacgccgtgcagcgtcaccggcggaacgttgaagcttttcatttgctgaagattcagcgtatcaaaggcatggaacagcgccgtctgcagttcagcttgcatacatcccctccgctttttccctcccgctgttggcgattgccagcggggtcataaacaggctgtgctgcggcaaatgcaccggtaatgccgggaagcgctgacgaaacagctcatgcacacccggctgcatacaggcgccgcctgccagccacaaatcgacaatcccttgtccggcaatatgtcgggcgacaatttcggccatcttctcgtacaccggcttaaccaccggccagatctccccggcgtggctgcgcttgtactgctccgcctcctcaagcccgatgccgcgattcccggccagagtcagggagatatggtggccgccggtggcttcatccgccgaatacgtcaccctgccctgtttaacgatggcgatcccggtggtgccgccgccgatatccaccaccccggcgttatcgagctgcagcagatcggccaccgcggtaggctcatccagcacatgactgatctccagcccggcggactccaggacattgatcgaaatgcgcggatcggtgccgggcggaaacgaggtcgccgcatgggtgaagcggcagcccagctgctgctcgagagtcgcaagatgtcggcgcacgagggtgacggcgccaaagaaatcccagacgatgccgtcgcgcaccacgtcggcccagtcaaggcataccgcaaccggctggccgtcacggtcaaccaccatcgacaccacgtcgcaggtgcccaaatcgatgcccagccacagcggcgactcgctggcggcgggctcctggttacacagggcagcggctttttgcagtctcggcgaaagccagcgttgttcgtcgtgcgccatgttcatcccttatacgattcgaaacgcatccaccagcacgcagcggcgcagacgaacgaaggtccgcgcgctggtcaccccttccccggttggggtggtgatggtcatggtggtccagccctcgccacccagcccaagcccggcgatgcacggcccgtttttgacgaagatgctggtgtcgatggcgttcgccatctggttcatgttgtcgatattgcgcgagtgcatcgccgccgtatggtggcagccgccttccagttgcaccgccagggcgatggcctcctcgacgttcgccacccgcaccaccggcagcaccggcatcatcagttcagtcaccgcaaacggatggctggcgggggtttccacgaacagcagacgggtttgcgccggcacctgcaggccaatcgccgcggcgattttgcccgcatcgcggccgacccagtcgcggctgaccgtgcctttgccgcgctcgtcgatatttttcagcagcagcggctggagctgttcggcctgcgccgccgtgagtttcaccgcctgctggccttccatcaggcgcatcagttcgtcggcgacgctatcgaccacgatcagcaccttctcgtcggcgcagataatgttgttatcaaacgaggcgcctttgacgatcgcctgcgcggcgcgcggcagatcggcggtctcatccaccaccaccggcgggttgccggccccggcggcgatcaggcgtttgttggtatgtttgcgcgccgcctcgaccaccgcttcgccgccggtcaccaccagcaggccgatgccagggtacttaaacagccgctgggcggtgtcgatatccgggttcgccacggtcaccagcaggttggccgggccgccggcggccactaccgcctggttaagcagggtaattgccctttgcgagacctttttcgccgccggatggggggcgaagaccacgctgttgccggcggctatcaggctaatggcgttgttgatcaccgtcgccgccggattggtggacggcgtcaccgaggccaccacgccccagggcgcattttcaatcagcgtcaggccgttatcgccggtgagcacctgcggagtcagacactccacgcccggcgtgccgcgcgcctgcgccacgtttttggcaaacttatcttcaacgcgtcccatgccggtctccgtcaccgcaagctccgccagttcacgggcatacttttcacccgcctcacgaatggcctgaatcacctgctgacgcatcgccacccgctttaatccctgctgggccaccgttgccgccgcgacagcgtcatccagtgaggcaaaaacgcccatatcatgaacggtgccggcaggctggctgctgtctttcattttcagcagtaccgctttcactacctgttcaatgtcctgttgattcatgatttttcaccctacttatggaagagcacctgaccatcggccgcggcctcatccacgataccaatcacgcacagatcgaccggagaggcgccgtgtgcgtgcgcctgtcgcgccgagctgccgctgaccagcagtacccactctccgcatcccgcgccgatgctgtcgatggcgaccgcgcattgcccgtcgggctcgccgcgggcattgagcatctccaccatcagcagtttgtcgtgggccagaccttcatggcgtacggtgcagaccacatatccggttaccacagccagcttcatgtccgtctccgcgtgtgatgtgcaggccggaaaagcgcaacgccatccggcattcatgccttttcatggccggatagcgacgcgctggcgtcttatccggccagaactttccggcaccccctcccccgttagatgttactgtcgcccttgaagctaatcgggaagacctcttccagatcgccatgcgggcgcgggatgacatgtacagagaccagctcaccgatacgctgagccgccgccgccccggcatccgtcgcggctttgcacgccgcgacatcgccgcgcaccatggcggtcaccaggcccccgccgatctgtttcactcccaccagcttgacgcgggccgctttgaccatggcgtcggaggcctcaatcagtgcaaccaggccccgggtttcaatcattcctaatgcttccattgtgttttcctctcataaggggtcctgaaggggaccattcattcaaccagcgtggacgagtcggggatccggcttgcgtccgtctggcgcggtaccgacgccaccagcgccagttcgataatttcctctacgctacagcctcgcgagaggtcgtgaagcggggcggccaggccctggatcagcggcccgatggcgcgatatccgcccagccgctgggcgattttgtagccgatgttgcccgcctccagcgacgggaagaccagcacattggcccggccctgcagcgggctgccgggcgctttgtgcgcagcgacgtccggtacaaaggcggcgtcaaactgcagctcgccatcgaccatcagctgcggcgcccgctgacgcacgatctccgtggcctgctggacgttagccacacagggatgccgggcgctgccgtgtgtcgagaaggacagcattgccacccgcggcgcttcgccagcgatcgcttgccaggtctcagcgctggcaatcgcgatatccgccagctgcgccgcggtcggctgcggcaccacgctgcagtcggcaaaccccagcggctgtccggtatactgcggcagcatcagaaacagcgaagagagcgttttacaccccggctgcaggccgataaggcgcagaccagcgcgcagcacgctggcggttgacgagagatttccggcgatacacacctcggcctgcccggcgctgaccatcgccgcggcgaacatcagcgggtcggccagcttgtcgaccgcgtcagcgggcgctttatcgccggcgcgcgcctgccaggcggcggcaaacgtctcgcgcatcgccaggttgctgtgcggatcgatgacctgcaccccggtcagcggcagacgttcgccaagggcgaactgccgcagcgcgaaggggctggcgacgaggatcggatgcgccaggccctgctgctgcagataatgcgccgccttcaacacgcggacgtccagcgcatccgggaacaccaccctggcgggggcgcgcagcgccagtttgcgacactggtcaatgatcatcttcacctcccagctgctgcagttggctgagcgccggcggcgcgtccgtcacgcccaggatcatcatcacgtagaccgcgctggagaggcggttgagcgcctgtagaatatcggcacgctggaccgcaaattgcggcgtaataaacacctgcgccgcggtcacctccgcctcgcgcactttgccgcgcagcaaattaagcagcgcgacatcgcgcccatggcgggcctccggcaccaggtgatcgtgacccaggtaacgcagcggctgatgggacagacgatgcagctgcgcctcgctgaatccggctatcgactgcgccgccagcggttcctccagcgcatcggcgcgcatgatgttgcccagccgcgaacggatatccgtcagccacggctgccagggctccgccagttcaatttgcagccacaccgtcagggcgatggtgctgtccagcaccgcgcggaaggccagccgcggatcgtttttcgccaccagggtatcggccgtcagatgagttaaggtgtccggctttttgcccaccggctggtgacaaagctcgcagcaggcctggggcggatggtcgctgctggtcaggacatgcaccggctgcggcgtctgttcgtcatcctcgacaaacaggcgcccctggcggtcgagaaatttgacccgcagatgccgactttccagcagttccctcgccgagggcgtcaggcgggcatcggcaggaagatggatttcaccgccttcgctgagcgtatgattcgctctgagccacgcttcggtaatgaaatcgttcatagcgattgccagtttgccggccaggcgacgtacaggaagcgcaccgtcgacggggtaccgaattcgatgctggagcctttcgggatgaacatgacgtcccccgctttggcgaccagcgtttccccctgatggcgcacatgcagctcgccctccagcaccatatcgatttcgtcgtagttcagcgtccacgggaagaaggcgttctcccactgcataaatccggccgccatgctgctgccatcctggtcagtcaccaggtccgttaagccaacgcagtgcggctgggcgccgtcgaagcggccaaacttcacgctgctgccgtcgatcactttgatgccgcctttgccggtcacggagtcaaatcccggctgcatcgcctcctgctccagggactgcttctccttcatcaccttttccatcagctgcgccaccaggctttcggtaaactggccttccggcagctgcgccaggatggtttcccggatccgctggctttccgttttgtcgctgtccgccgctgtcgccgccggcgcggcgccatcgtcttcggtgatagtgaatcccagcagctcggcgacttcgcgcgcttccggggtgataatgctggcgcgcagaactactgacatcgcctgttcgccgcgcgcgtgggcggcacgaatatcgttagcggtaatgagtttcttcacctggcccttcctccttttggctgagctcactcaagtaattttccagcggcgcaacgctttgcggatcgcaaccgttgagggcgaaaaccggcgcctgaaaccccatcccgtccagcagctgccgcaccgcggcgacattggcatccggcagatccgttttgctgatcgccacgataaggtgctttcggctgccaatatccagcaacccgggtggcaggcgactttcggtatcattggccgcatggacataaatcagggtgtccacatcctgcaaggtggtaattaaggcgtgataccagcgcggatggctgaaatattccccgggtgtatcgatgtcgccacgatcgttaaattccagcgcctgcgtttttctggcgagggaataattcccttgcagggcattaaataacgtggtttttcctgcaccgacggcgccgacaatcgcaatacgcttcatggtcgctctcaattaacttttcgttaattcgcacaaggtataatttaataagcggcctaatccgccgatggtctgcagaagcgcctcctccaccgcgccgaccgagccgtagatcaccagcgcgccgctaaaccggtcgagaaaaccgatgtgcacgtcggcggccttcatcgccagatcgccggcgatcatcgccgtttctcccggcgtcagcgtcataatgccgatcgcgccggattcgggtacgccgatctttttcgccagctccgctcccgggtgggcaatcagatgcgccagcgtgacctgtttgcctggtacgaattcctgaataatgcgttctttatccatgactgattgccccctgaaatctgtcctcatggtgacgacatttcagcgcggcaaataacaaatttcggcaagtggggttaaaaggtgaagtggatcactcaggagagaaaataatattgcggtggaattaaaaaggcaggctcagcgttttttactcaccggcctgcctgatattgcgcgcggaaacggatccgcgcgttaacgggggaaatagaaaattacagcggttcggtttgcgcttcaacaaccgccagcgccaccatattaacgatccgacgtacggaggcgatcggcgtcaggatatgcaccggcttcgccacccccatcagcaccggcccgacggtcaccccttccgaactggagacgcgcagcaggttatagctgatccgggcggcttccatattcggcatcaccagaatattggccgcccccttcagcgggctgtccggcatgcgatcgttgcggatgctttccaccagcgcggcgtcgccatgcatttcgccatcgatcatcagctccggggcgcgggccttcaccagctccagggttttacgcattttgctggctgacggacagtcggcagagccaaagttggagtgcgacagcaacgccacgcgcggttcaataccaaagcgtcgcacgctttccgccgccatcagggtgatctccgccagctcttccggcgacggatcgtgattgacataggtatcggcgataaaggtgttgccgctcggcagcagcagcgcattcatcgccccggcggtgctgacgccgtcgcgatagccaaacagcggctgcaccacgcggtagtgatcgtggtactcgccaatagtcccgcagatcatcgcatccgcttcaccgcgatgcaccatgatggcgccaatcaccgtggtgttgctaatcaccgcccgctgcgcctgctcctgggtaatgccgcggcgcttcatcagctggtagtactcgctccagtactctttaaaccgcgggtcggattcattattgacgatctcaaagtcaacgccggccttgatctgcaggcccagcttctggatgcgcatttcaatcacgctcgggcgccccaccagaatcggtttggccagtcccagagacaccagctcctgggtggcgtgcagcacccgagtctcctccccttccgccagcaccacgcgcttcggctctttgcgcgcctgagagaagataggcttcataaacaggttggttttatagacgaactcgctcagtttctcgatataggcgtcaaaatcagcgatcgggcgcgtcgccacaccggagtccatcgccgccttcgccaccgcgggggcgatcttgacgatcagccgcgggtcgaatggtttcggaatgatgtactccggaccaaagcttaaatcctgatcgccgtaggcggaggccaccacttcgctctgctcggcatgggccagctcggcaatcgcatgcaccgccgccagcttcatctcttcgttgatcgccgtcgcgccgacgtccagcgcgccgcggaagatgaacgggaagcaaagtacgttgttgacctggttagggtagtcggagcggccggtacagatgatggcgtcatcgcggacctgcttcgccagcggcggcagaatttccggctccgggttggccagggcgaggatcagcggcgcgcgcgccatcttcttcaccatctcctgagtcagcactttcgggccagagcagccgaggaaaatgtcggcgccgtcgatcacgtcatcgagggtgcgtttgccatcgtcttccaccgcataggcggctttggtttccgccatgttcggctcacggtctttatagataacgcctttcgaatcgcagaccacgatgttgtgcttttgcatccccagcgccaccagcagattcatacaggcgatcgccgccgcgcccgcgccagagaccaccatccgcacgtcggacagattcttctcgacgacgcgcagaccgttgaggatcgccgcggtgctgatgatcgccgtgccgtgctgatcgtcatggaagaccgggatattcatccgctcgcgcagctgctgctcgatgtagaaacactccggcgctttaatatcttccaggttgataccgccgaaggttggttcgagggcggcgacgacgttaatgaatttgtccggatccagctcatcgacttcgatatcaaacacatcgataccggcaaatttcttaaacaggacgcctttgccctccattaccggcttaccggccagcgcgccgatgttgccgagccccagcaccgcggtgccgttggagacgaccgccaccaggttgccgcgggcagtgtatttgtaggcggccagcggatctttttcgatttccaggcagggggctgcgacgcccggcgagtaggccagcgccagatcgcgctgggtggcgagaggtttggtcggcgagacctggatttttccgggaaccggaaattcgtggaaatcgagggcgctctgttttaactgctcatccattttctattcctttctttcacgtatcgttcgtaggggaaaagcgtgatgaccatcctgtcgttcacctttcagtggcagacagtatccctcctggcggggcgataaactttgaacaccgccaaactctggccatcgttatgattttgttgttatcaatttatagcggttatgttacccggattcgccgccaataatagccctgtctgctatgctttttggttatgtacctcatcaatgtttataccgtataccggcaagcactcatgtaacaccttgttccaggaggacttatccatgaatcagttagacagcatcaagcagttcaccacggtggtcgccgacagcggagacatcgaatccatccgccactaccatccggaagacgccaccaccaacccctctctgctgctgaaggccgccggcctggcgtcctatagcggcctcatcgacgacgctatcgcctgggccaaaaaacagggtggcggccgcgaagcgcaggtgactcacgcctgcgataagctggcggtcaattttggcgcggagatcctcaaaagcattcccggacgggtctccaccgaggtggacgcccggctctccttcaaccgcgagaaaagtatcgagaaggctcgccatctggtggcgctgtatcaggagatgggcattgataagtcgcggatcctgatcaagctggcatccacctgggaggggatccgcgccgcggaggtgctggagaaagaggggatccactgcaacctgacgctgctgttttccttcgcccaggcccgggcctgcgccgaggccggggtttatctcatctccccgttcgttgggcgtatttatgactggtatcaggcgcgcaaaccgctggagccttacgtggtggaggaagatccgggggtgaaatcggtgcgcaatatctatgactatttcaaacagcataaatacaacaccatcgtgatgggcgccagcttccgccgcaccgagcagatcctggcgctggtcggttgcgaccggttgaccatcgccccgcctttattaaaagagctgcaggccagcgataccccggtggtgcgcaaactgatccctgccagccagatcctgccgcgtccggtgccgctcagtgaagcggagttccgctgggaacataatcaggatccgatggcggtcgaaaagctagcggaggggatccgcctgttcgccgtcgatcagcgcaaactggaagatctgcttgccgccaaactgtcactttagtctcacggagaaaaatatgtcccgaagagagcttgccaacgccatccgcgccctgagtatggacgccgtgcagaaagccaactccggccatcccggtgcgccgatggggatggctgatattgccgaagtgctgtggaacgattttctcaagcacaatccgcagaaccctgactgggtggaccgcgaccgtttcatcttgtccaacggccacgcgtcgatgctgctctacagtctgctgcacctgaccggctacgatctgccgctgtctgaactgaagcagttccgtcagctgcactctaaaacgcccggccacccggagcatggctatacccctggggtggaaaccaccaccggtccgctgggccaggggctggcgaacgccgtcgggatggccatcgccgaacggacgctggcggcgcaatttaatcgccccggccatgagatcattgaccatcacacctgggtgttcatgggcgatggctgtttgatggaggggatctcccatgaggcctgttcgctggccggcacgctcggactgggcaagctgatcggtttttacgatcacaacggcatctccatcgacggcaaaaccgaaggctggttttccgatgatacggcggaacgcttccgcgcctatcactggcacgtcataggcgatatcgacggccacgatccgcaggctatcaaacaggcgataacggaagcgcaggcggtgaaagataaaccgtcactgattatctgccggaccatcatcggtttcggttcgcccaacaaagccggctcagaggagtctcacggggcggcgcttggcgaaaaagaggtagcgctggcccgccagcagcttggctggaaatatcctccgttcgagatcccgaaagagatctacgcgggctgggatgcgcgtccgcgcggggaaaaagcggagcacgcctggaacgagaaattcgccgcctaccagcagcagttcccggagctggccgctgagctgacccgacgtatgaatggcgccctgccggaagactttgccgcgatcgcccgcgactacgtggcgaaactgcaggccgagccggcgaaaatcgccagccgcaaggcttcgcaaaacgcgctgaacgcctacggcccgcacctcccggaactgctgggcggttctgcggatcttgcgccgagtaacctgaccatctggtctggatcgacatcgattaaagaagatcctgcgggcaattatatccactacggcgtgcgcgagtttggcatgaccgcggtggccaacggcattgccctgcacgggggctttattccttatacctcgaccttcctgatgtttgtggagtacgcccgcaacgccgcgcgcatggcagccctgatgaaggcccggcagatcatggtctatacccatgactcgatcggtcttggggaagacgggccgacgcaccaggcggtggaacagctggccagtctgcggctgacgcccaacttcagcacctggcgcccctgcgaccaggtggagaccgccgtcgcctggcaggcggctatcgcgcgacagggcgggccgacggcgctgatcctgtcgcgacaaaacctggcgcagatgccgcgtaccccggaacaggtgcaggatatcgcccggggtggctacgtgcttaaggatgccggcggcaagcccgacctgatcctcatcgccaccggctcggaagtggagatcaccgtcctggccgcggaaaaactgttggccaaaggggtaaatgtgcgggtcgtctcgctcccttccactgatgtgtttgacgcccaggatgaggcctggcgcgaatccgtgctgccgtcggacgtcagcgcccgggtggcggtcgaagccgggatagcggactactggtataaatatgtcggcttaaaaggcaagatcgtcggcatgaccggctatggcgaatccgccccggcagagcagttgttcccgttctttggctttacggtcgaccatatcgtcgccaccgccgaacaggtgcttaacgggtgatccacagcgtgggccaggcatctggcccctgccagttgtcgcacgtcggctgctgcgcgtagcgggagaggctgaaccgctggccgtcaaaacgccagcgggtttggatcccgcaatcgccggccccgcggcctttatccagggtcaccagctcatggcggcggtcatcatagctggcgttgatcagctcaatctcccgcggcgcctcgcccggcggctgaaatggcaacgttagccgcacctgatgggcgacataggggcgctggcgggagaccagccaggccagccagacggtgttgtaggcgccggattcgcagctggtcatcagcagcactttgtcatccgtcagcgctgtaacgcgaatttcgcggcggaagggatcgagggagcagtggctgttggtcatccgctcattaccatagtccatcagatcgttgagctcctcacgccccagcggcgactgcgccgtttccgcgctcgccaccgcgcgcagcgccggcgccggcggtacgctgagcggcggctcttcccctttgccgacccaggccgtttcgctacctacccgcttttgccgatcgtcgataaaaaacagagccgctttcaacccctgcagggagatggtctgcaggccattggccagcgagagcgctttaccctcctgaacctgctggagaaacgcatcgatcgtcacgctgtcggcggttttaatgagtttatcttcaatgtgccagcgcttgtcggtcagggacagcggtttaccatccagcagcaggcgcggcgctatcggcgcgagcgtcgccactggattgccggtgccgcccagctcgatacgcagactggcgtcagtgactgccccagcgctgcggctgagggtcatcaccaggccatgatgcagccccacgttacgggtgacgcagaaattttggttgttacaggtgaccagccagtcgttgaagcgctgctgcgtcggtgccgaccatgcctgcgagcaaggcagcaccgccagaaaaaggaaaaagatgacgcgaaaaagcatgaaccgcccgaccccagataaacccgaccacggcgcctatcctggacaacggcagcgggttactcaatcggatttgtcagagttccccgacatcaggccggaggtttgcagatattgcagcagaatgaccgccttaccgtcgcggatctccccgtcagcgaccatctgcagcgcctggctaaaaggcagctccagcacctcgatggcttcatcatccaccccgccgccgctggtggttcgctgcgcgtcgctgtactcggcgataaagaaatgcactacctcggtgacgccccctggcgacataaacagctcaaacagctttctcacctcgcccacttcgtagccggtctcttccaccgcctctttacgaatgcaggcttccggctcgtcgttgtccagcagcccggcgcaggtttcaatcagcatgccgtcatgattgccattgacccaggtggcgacacggaactgacgcaccaggaccaccgtctgcttatggcggttatacagcagcacggtggcgccattgccgcgatcgtagacctcgcgcttgtggcgcacgacgctgccgtccgcccgcgtcagctcataggtcatgttgcgtagtacgaaccagttctcagagaggattttatctttaatgacgtgaatattgagtgacataccgaccccacagcgtaaaaggacgccctcatactacgctgcggagccgggtttgtcgtcagtgaagcggcgtcgttttccgcgccagatagtccaggatcccctgcgccgcgtgacggccttccgccatcgccgtcactacaaggtctgcgccgcgcacggcatcgccgccggcaaagatcttctcctgactggtctgataacggtaacgactctccactccggctttaatacgcccctgactgtccagcgccacccccgccgcttccagccagggcatgcggtgcgggtggaagccaaaggccatgatcaccgcatctgccggcataacaaactcgctgccggggatcggcgtcggacggcgtcttcccccggcgtccggagcgcccagctcggtgcgcaaaaagcgtaccccgttaacccgcccgttctcgtccagctcaagcgtcaccggctggacgttaaactcaaagagcgccccctcttcgcgggcgtttttgacctcttttttcgagcccggcatgttggcttcatctcgccgataggcgcaggtcacctggcgggcgccgtggcgcagcgcggtgcgcacgcagtccatcgccgtatcgccgccgcccagcaccaccacgttcagcccggcggtgttgacataaggctcttgcgccgatgccgccagccccatcacctgtttggtgttggcgatgaggaacggcagcgcatcgtagaccccgggggcctcttcgttcggcagccccgccttcatggagcgataggttccggcgccgacgaacaccgcgtcatactcggccagcagtgtcgccatggagatatctttccccacctcgcaattgagctcaaagcggatacccatctcgctgaagatcgcccgccgccgggccaatagcgatttatccagcttgaacgccggaatgccgaaggtcagcagaccgccaatctccggatgacggtcgaagaccaccggctggacgccgtggcgcaccagcatatcggcgcaggccagcccggccggcccggcgccgataatcgccacccgcttgccgctcggcttaacctgcgaaaggtccggacgccagccgctggccagcgcctggtcggaaatatagcgctcaatattgccgatggtgactgccccgctttcatcgcgcagggtgcaggcgccttcacacagccggtcctggggacagacgcggccggtgatctccggcaggcagttggtctgatgggaaagcgcgaccgcggcggcgatattccccgctttaaccagctcgatccactgcgggatatggttatgcagcgggcaggtccattcgcaaatactgtgctccccacacgtgagacagcgggcggcctgctgctgcgcctgctgcggggtgaacggctgatagatctcctcaaagtggctcttacgcacctccgccgccagcttatccggctccccgcgcgggggcgtcatcgccatttgcctgaccttcgcgccagcattgggctggctgcagagcggcgtagcgcgctgccacggctgcacctcctggcatgccgagcgcagtcgccgctgcttcgccagggtgatcaacgtctcatcgtcggcgagagtcagcgcctgcgcgggacagttttccacacaggccggccccgcctcgcggccctggcatagatcgcacttgtgcgcgctggctttcaccaggcctgcggcctgcggcgtcaccaccacctgcatcaccccgaacgggcaggccaccatgcaggatttacagccaatgcatttctcctgacggacctgaacgctgtcgccggactgggcgatggcgtcgttgggacaactgcggacgcagggggcgtcctcgcagtggcggcaggtgatggcgttacgctggccctccgctttgatcacggtgatacgtggcaaaaagcgctgcggggtcagcacgtgttgctcctcgttatgcgccatcacgcaggccacttcgcaggcctggcagccgatgcactttcggctatcgctcaaaataaagtggttcatggcttccttttgtcttcttggtgaataacccctcaatgcgcatgcctatttattacccgacaagatgacgccggaacaatgtccaattgcccaggatgaactttttctggagagaatccgttttggatcaatttttttgacttaaatgaaatgaggtttcacaccggcaagggataatgcgccggtctgcggtgacgaagcagactcgctacctgctggcaggaaagctcgaggtttctttacgatacggcaaaagcaacatgataaattacactatctccttaatttctccacgattgccggagaggctggcgctaaagtggcacaggctgtgcaataacaagaaaatgtgcatatgaggtttttattctgatggcgaatttctttatcgatcgccccatttttgcatgggtgctggcaatcctgttatgcctgacgggcgcccttgccattttgtcgctgccggttgaacagtatcccgacctcgccccgccgaatgtgcggatcaccgccaactatcccggcgcttccgcgcaaaccctggagaataccgtcactcaggttatcgaacagaatatgaccggcctcgataacctgatgtatatgtcctcccagagcagcgccaccggccaggcgacgatcaccctcagctttaccgccggtaccgacccggatgaagccgtgcagcaggttcagaaccagctacagtcggcgatgcgtaagctgccgcaggcggtgcaaaaccagggggtgacggtgcgcaagaccggtgataccaatatcctgacgctcgccttcgtctccactgacggcagtatggataaacaagatatcgccgactacgtcgccagtaacatccaggacccgctcagccgcgtcaacggcgtgggggatatcgacgcctacggttcgcaatactcaatgcgcatctggctcgacccggcgaagctcaacagctaccagatgaccaccaaggatgttaccgacgccatcagttcgcagaacgcccagattgccgtcggccagcttggcgggacgccttcggtcgataagcaagcgctgaacgccaccatcaactcgcaatctctgctgcaaaccccggagcagttccgcaatatcactctgcgcgtcaatcaggatggttcagaggtgacgctgggcgatgtcgccaccgtcgagatgggggcggagaagtacgactatcttagccgctacaaccgccagccggcctcaggcctcgggatcaagctggcttccggcgccaacgaaatggccaccgcggagcgcgtgatcaatcgcctcaatgagctggcgcagtttttcccccacggtctggaatataaggtcgcctacgagaccacctccttcgtgaaggcttccatcaccgacgtggtgaaaaccctgctggaggcgatcctgctggtcttcctcgtgatgtatctgttcctgcagaacttccgcgccaccctgatcccgaccatcgccgtgccggtggtgctgatgggcactttcgcggtgctgtatgcctgtggctacagcatcaacaccctgacgatgttcgcgatggtgttggcgatcggcctgctggtggatgacgccatcgtggtggtggagaacgtcgagcgcatcatgagcgaggagggcctgtcgccacgcgaggcgacccgcaaatcgatgggacaaattcagggcgcgctggtggggatcgcgatggtgctgtcggcggtatttgtgccgatggccttcttcggcggcaccaccggcgccatctatcgccagttctcaatcactatcgtcgcggcgatggtcctctcggtgctggtggccatgatcctcacccctgccctttgcgccacgctgcttaagcctgttaagccaggtgaatcccatgaaagaacaggcttcttcggctggttcaaccgcaccttcaaccgcagcgccagccgctacgaaaccttcgtcggcaaaatactgcaccgctcgctgcgctggatgctgatctacgtcctcctgctcggcgggatggtgttcctgtttctgcatttgccgacctcgttcctgccgctggaggatcgcgggatgttcaccacctcggtccagttgccgagcggcagcacccagcagcagacgctgaaggtggtgcagaaggcggaagattacttcctcaataacgagaagcagaacgtcgagtcggtgttcgctaccgttggctccggccccggcggcaatgggcagaacgtggcccgcatgttcgttcgtctcaaagactgggaccagcgcgacccgcaaaccggcacctcctttgccattattgaacgcgccaccaaagcgtttaatcagattaacgaagcgcgggttatcgccagcagcccgccggcgatcagcggcctcggcagttcggcaggcttcgatatggagctggaggatcatgccgggaaggggcacgatgcgctgatggcggcgcgcgatacgctacttgagctggccgggaaaaatccgctgttgacccgcgtccggcataacgggctcgatgacagtccgcagctgcaggtcgatatcgatcagcgtaaagcgcaggcgctgggcgtctccattgacgacatcaacgatacgctgcaaaccgcgtgggggtcgagctacgtcaacgactttatggatcgcggccgggtaaagaaagtctacgtccaggcggcggcgaaataccggatgctgcctgacgatatcaatctttggtacgtgcgcaacagcagcggcacgatggtgccattctcggccttcgccacctcgcgctgggagaccggctcgccgcggctggagcgctacaatggctactcagcggtggagatcgtcggtgaggcggcgccgggtatcagtaccggtaccgcgatggacatgatggagaagctggccgcgcagttacccaccggctttggcctcgaatggaccgccatgtcctaccaggaacgcctctctggcgctcaggcgccggccctgtacgcgatttctctgctggtggtgttcctgtgcctggcggcgctgtacgagagctggtcagtgccgttctcggtgatgctggtggtgccgctgggggtgattggcgccctgctggcgacctggatgcgcgggctggagaatgacgtgtacttccaggtgggtctgttgacggtgatcggcctgtcggcgaaaaacgccattctgatcgtcgagttcgccaatgagctcaacgagaagggccaggatctgctcagcgccacgctgtcggcttgccgtcagcgcctgcgccccatcctgatgacctcgctggcgttcatcttcggcgtgctgccgatggcgaccagcaccggcgccggttccggcagccagcatgcggtcggcaccggagtgatgggcgggatgatctccgccaccgtgctggcgatctttttcgtgccgctgttctttgtgctggtgcgtcgccgttttccgctaaaggagcgtccgcaataaaccgacgagcttcggcggcgaggcgtaataacagaaaaggcgaccacggtggtcgccttctttatgtgttcagaaccctagcgcgcttatttacttcgcgttattcccctgctcacattgcggaaatttatttacgaagcatgccttcaataaagtctttccagttccccagttcatgttcaatcataatagcctctcttattattatggtcgattctatataacttcattaccgatgggaagttgtgctcccctattgctctgattgtcttatggaccgctgacagagataaaacctctggttgtcgctactatgccgcttcgtatgtaaacataatgtgacgtagagcaacctcagacaacatttttgcaataatgttaaagccctcacatcatgcccacaggtggccaacatttaaccacccgatatatcgaatgagatccccggtaaaaagttatatttattcatctgaatcacgtattatttcagtaagacttatatattcggaaatatctgagttaaccgcttaattgaatgtaaaaggtttatctatgctcaccatgtacggaattaaaaactgcgataccattaaaaaagcccgccgctggctggaagcgcatcagattgagtatcgcttccatgattaccgcgccgatggccttgagcgcgcgcaactggatacctttattgccgagctgggctggcaggcgctgctgaacacccgtggcaccacctggcgcaaactcgacgagtcgctgcgcaatagcatcgataatgccgacgccgctgccgcattgatgctggaaatgccggcaattatcaaacgcccattgctctgcgcgcccggtcgtcctatgctgctgggttttagtgaagcaagttatcagcagtttaacgaggtatagtctatgtcttgcccggtcattgagctggctcagcagcttattcgccgcccttcccttagccccgatgatgcgggatgccaggcgttaatgattgaacgcctgcgtgcgatcggctttaccgttgaaccgatggatttcggcgatacgcagaatttctgggcctggcgcggccacggcgagacgctggccttcgccggccacaccgacgtagtcccggcaggcgacgccgaccgctggatcaatcccccgttcgaaccgaccatccgcgacgggatgctgtttggccgcggagcggcggatatgaaaggctcgctggcggcgatggtggttgccgcagagcgttttgtcgcgcagtacccgaaccacaggggccgactggcgtttttgatcacctctgatgaagaggccagcgccaaaaacggcaccgtcaaagtggtggagacgctgatggcgcgtaacgagcgtctggactattgtctggtcggcgaaccttccagtaccgaagtggtcggcgatgtggtgaaaaacggccgccgcggctcgctgacctgcaacctgactattcacggcgtgcagggccatgtcgcctatccgcaccttgccgataaccctgtccaccgcgcggcgccgatgctggcggaactggtcaatatcgagtgggataaaggcaatgagttcttcccgccgaccagcatgcagatcgccaacgtgcagtccggcaccggcagcaataacgtgatccccggcgatatgttcgtccagttcaacttccgcttcagtacggagctgacggacgagatgatcaaatcccgggtgatcgccctgctggaaaaataccagctgcgttacagcgtggagtggtggctctccggccagccgttcctcaccggacggggcaagctggtggatgcggtcgtcaacgcgattgagcactataatgagatcaaaccgcagctgttaaccaacggcggcacctcagacggacggtttatcgcgcgcatgggggcgcaggtggttgagctgggccccgtaaatgcaacgattcacaaaattaatgaatgtgtgaacgccgccgacctgcagctgctggcgcggatgtatcaacgcgtcatggaacagctggtcgcctgacgaattgacgtaaagaggaagcgcgcatggaatggcttattaaacactggtggattctggtgctggtctttttggtgggggtaattatcaacgtgattaaagatctgaatcgcgttgaccacaaaaaattcctcaacaacaaacccgatctgccgccgcaccgtgattttaacgataaatgggacgatgacgacgactggccgaagcacgaccagtcgaagaaaccgtaagtttgcctttatcgcggtaccgcccgcctgtaaccccgctctccggggttacagcatttcgatgatatcatccccttttggcgtactgccgctcagcgcctcatcaaaatagtgcttcggcacggtataacgcagacgctcgatcgccaactgcatactgcgatcgtcaatggcatgcccgagatcgtcgacaatatctaaggtcacgtcgccgcccgcctgctgtaacgcctcctcggccgacaccgcccacgccaggtcgataacccgatcttcacccccgtggatcaggtgaatggtagtggccgtcgttgccgtctccggcagcgtcgcatagcggccattaaaggcgatgacccgcgaagccagatccggcgccgctttgatactctccagcgacataatcgccccctgagagaaaccgatcagcgcggtggccagtggactgacgccgctcttttcctgccagtagcgtacaatttcaataaaggtcggcataatggcgtcgatgcgctgctgacgattctcttccgtcaccccctgcagcgaaaaccactgccgaccgttggggccgcaaggttccaccccgccaatgctgacgatcagcgcatcaggaaactgcggtgcgaaccagctgccgatttgccccatggagaccgggttatcccctacgccatgaaacagcagcaacagctgttgcgcaggcgtcgcaggactttgaacaataaaatgatcgtgtttcatggctgtctccttagtgtttgcgggcagtgtacgccgctcgccagatatgaccatgccatttaactgaatgagttagttaaaaaaattgcagatgcgccacctgctgacgcagcgcatcagcgcgcgctgcatcaagggagcgcaaggcgtcagcggcctcccgacgccatctcgcctgcaaggcttttcgccccgtcagctgcagcacggcgcagagtgcggcctcctctttgccctgcagtcgtccccgcagggccggcaacggcatgtcggcctgcatcagcaggcggttgaggcagcccagcgccgcagccagcgggcggtgggcgaaggcaaagctcgccgcttccagccagtcctcatcactaagcatagcgtctgcgacggccggcagcggcgcggattcctctcgccacgggcgaagccagtattcatcgcgctgcagccgctgcgcctcccgctgcgccagctggcgccctgccgcggtcaacggatagagggccatcgccgtatagcagccgctgctggcctcgcgatgggtacccagccgtacgagggtaaacccgcagcgttgccagaagcgccacagctcagcggtatagccgaagctgacggagagatagtcatagccagcggcatcggcggcgatatcggcgatcatcttccgcccgaggccttcccgctggcgggtgggatggacagcgatccgactgacccgcagcccgcgcagcgtcgccgccaggggactgccgccgtgcgccgccagcgactgggcgaccagattcccgcgcggccggcgaaaacccgcccataccgcccggctaagttcgggagaaagtcccccctcggccaccagccacagggcgcccgccaccgcgccgccggcgcgagcgcagcggaaagcctggcccggagcatccatcatgcgccgcagatcgagcggggaagttcggtaatgcgccccggacaatagctggtacatcgcctccggtagcgctggctgcgtttgccagcaggactgattgaccgcctccagggctatctcccccatcggcgcgtcgcgaaatgcctcatcgttaaagataagcaactgactgatggctgactccagcggacagcccgccgcccagcggatcggggcgctcagggtgaacgattgcagatggggcagactggcgcaaaatttcagcaggaacccgcgaccggtgccctcgtacccttgcaccgtcgtggtgagtagcgtgcggggaaaacggctcaccagctgccggagaagcggagccgggatagccgcggcctcatcgactatcagccacgccgccttttctttcgacgccagcagcgcatcgggcgccataaagcgcaacgtctccccggcaaagctggccagcacctcgacagcgctacgcgttggggcggtgacgatggcctcgcccccaagctggcgcaagagcatgcccgccagcgcggacttcccccgtccacgctccgccgtcaccgccgcgataccgggcggcaggcgtatcagttgctcaaggattgccgcctgctcggcctgcgggcggccatcggcgggatgccagtctggacgcggggcggccagcgggaaacgtggccggtccgactgccgccagagcaacacctccggatcggcgataaactgccgacagcagcggtgaacaaagttaggggtaacgatagggtcaggcgtatcgctccagcgcagagagtcctcatccgcccgggtcggccagtcggcgaaggggggcgtcagcagcaccagccagcttcccgcccgcagcgtgccgctcagggccgccatggcggccacatcaaacccgcgccgggcatcgaaaaaggcgtgcatcacttcccgccccagcagcgttttcagcgcgccgggcgccacgcagggcgcagaacccggctcggggccaacccacaggccatcgccgccgagcctctcccgtagcgcctgcgcctgctgcagcgtccagctctcatcgccgctgagcaccagcaggcgacggatcccctcccgcgccatttgcgcggtgaggttaagcagcgcgtccatcatgggggacgattacagcgcgctgccgaaggtattgcactgcgccggatcgccgctatcgaaaccgcgtttgaaccaggtgtagcgctgtttcgaggtgccgtgggtaaaactgtccggcaccacgcgtccctggctctgctgctgtagacgatcgtcgccgatggcctcggcggcgttcagcgcctcctgcagatcgccagtttccagaatatcctgctgctgcatattatgaccccagacgccggcgaagcagtctgcctgcagctccatcttaaccgacaggcggttggcttcggcctgcgtggcatgctgctgttgctggcggaccttcggctcaatgcccagcagtttttgtacgtgatgacccacttcatgagcaatgacgtacccctgggcaaagtcgccgtcggcgcccagtttatttttcatctcatcgtagaatgacaggtcaatatagaccgtactgtcggcaggacaatagaaggggcccatcaccgactgaccggtgccgcagccggtacgggtcgcgccgcggtagagcaccagctttggctgcgggtactggcggcccatcttttcaaagatcggcccccaggtatcttcggtggtagccagaatgacggaagtaaacttcgccgcttcatcgtctttcggactgatggagcgctgcgtggaggtctgctgctgcggcatcggttcgccggtcaacatgccggtcaaatccacgccgtagtagcccgccaccagcacaataatcagcagtacaatgccgcccttcccgctcggcagacggaagccgccgcccccgccgccgccaaacggcgagcctgattgtccacgtcgatcttcaacattgtcgctttcgcgacgcccttgccagcgcataagcacctcattccctgttatgtatcaatagcagagatcgtaggcggttcagcgcaggattaccacaggaaacagcaagagacgccagaagatgaggccatcttctggcggcgggcgggttagtcgagcttaacgcccaggcggtgagccacttcttcgtaggcttcgatcaggccgccaaggctctggcggaagcggtctttgtccattttatcgagggtgtttttatcccacaggcggctgccgtccggcgaaaactcgtcgcccagcaccacttcgcctttgaacagaccaaactccagcttaaagtccaccagaatcagaccggcgtcatcgaacagttttttcagcacgtcgttggctttgtaggtcagctcgcgcatccgcgccagattctctttactcacccagccgaaggtttcgcagtaggagtcgttgaccatcggatcgtgcatagcatcgtttttcaggaacaggtcgaacagcggcggattcagctcgataccttcttcaatgcctaaacgttttaccagcgagcctgccgcacggttacgcaccacgcactctaccggcaccatatccagttttttcaccagacattcggtatcggagagcagcgcttccatctgggtagggatgcccgcttctgccagtttactcataatgaaatggttgaatttgttgttcaccatgcctttacgatcgaactgctcgatgcgcgcgccatcacctgctgacgtatcgttacggaattccagtaccagcaggtccggattatcggtgctgtatactgtcttcgccttaccacgatacaactcagcttgctttttcatctttcactactccagtgatattgagccaaaaaatgacgtgtcggtcttacataacatcctgcaacgggcgttggagcggatgctgtacgcttgcggggcgaactgcagtcaggcgactggagcagccttaacgcggcgatttacaggattatatggccacgcacacgtttgcgtcactatatattaaaagggccggattgctccagcccttttgattacttgttaaatgcggcctggaatacggctaccagggcgtcattttgcgactgcgtcagggtgtggcctttcgggtcgataaactgcaggctactgcggttatcgaggtcgccgacctgcagtttgtagtcgccggagaccagctgcgggtcacgtgcgcccagctcctgccagctgctgtcagacagcggcttataggtcagcgccatgctgccctgagagcgcgtgctgtcggtcactttcatccccactttctcgagggcgccaggcagacgctgccacaccaggttaaacggcgcgcgaactacgagcatcggcaggccggtatcgtcggcggcgctctgcacgtcgaaggtggcccccgcgctgcgctgggcggcgttctgggcgctggtggcattcatgtcaaggccttccgaaatgacgttcagcatagcggtgctgtagcgctgcagagacgccggatcggcaaccggtttacccgcctgctccagattcaccagcttaacgaccaccgcttgctgataaccctgcggtttgacggagatttgataacgaccgcgatactgctgatcttcatcaagacggttccactcaacccagtcggtgttcagcgtctggctcgcatcatcgcgcttggcgataacgtagttcttcgactgaagaatactggtgacctgtgcccacagcgaaccgctgcggccgttctcgaccatcagcgtcgcggtatcgccgttaaactgggtccgcgcaccgctcaccagcgccagcggctgcgccggcggacgaatgtccagcgctttaccgaccgcgccggtgctgttagccaccggaatattgtaatcacccacctgaatcggcaggatcatccccgccggcgcatgaagttcgctcaacggtgatgcctgtaaataggcctcatcaccgctcacctgacgcttatagcgcgagtcagaactacaggccgcgaggagtagaaccagcgaaacacccgcaaccttcgccaggcgcgacttctgtactgagtaagccatcaaatctccctaaactttacagcaaaccggcatgcttcagcgcggcagtgacggcttcacgaccatgatcggtgataggcgtcatcggcaagcgcagcgtatcggtcgccacaagacccaacgccttgcatccccatttcaccgggataggattgggttcgacaaataattttgtatgcagtggcatcagacgctggttaatcgcacgagcttcggcaaattgacccgccagcgccagacggcacatgtcggccatttcgcgcgccgccacgttggccgtgacagaaatcacgcctacgccgccgagctgcatgaagtccataccggtcgcatcgtcaccgctcagcagaataaagtcgtctgaaaccagctctttgatctggtgaacgcgacttaagttccctgttgcttccttaataccgacaatatttttaatttccgccagacggccaacggtttccggcaacatatcgcaaccggtacgggacggcacattatacagaatttgcggcaggtcagtatgttcggcgatagctttaaagtgctggaacaggccttcctgggtcggacggttataataaggagtgaccgtcaggcagccaacaacaccgctatcgttaaaacgtttggtcaggctaatcgcctctgcggttgcattggctcccgttccagcgataaccggaatacgcccgtcggccagctccagcgtcatcatcaccacgtcgccatgctcttcatggctcagcgttgcggattcaccggtagtccctaccgaaacgatcgccgaggttccgttggcgacatggtaatcaatcagttttttcaggcttgtccggcagacattaccgttttcatccatcggcgtgacaagcgctacaatacttcccgtgaacatgggccatcctcagagcagaagtgcgacaagattctcaatgttacgtttggagctgtaataaaagcaagagacccgacgccatcagggatgttgtatggcggttttttttatgctttcctaatgttacctcacctttttaaaggaagaacaggtttgacagcctcattacaacactatctggttattaccgccctgggggctgaccgtcccggcatcgtgaatacgatcactcgccacgtcagcagctgcggttgtaatatcgaagacagccggctggccatgctcggtgatgagtttacgtttatcatgctgctttccgggtcgtggaatgcgattaacctgatcgaatcaactctgccgctgaaaggcgcggagctggagctgttgatcgtgatgaaacgcaccactgcgcgcccgccgcaggccatgccaaacaccgtttgggtccaggttgaggtgccggactcaccgcatatcatcgagcgctttactgccctgtgcgatacatggaatatgaatattgcggagctggtgtcccgcacgcagccgggagacggcgattccgcgcagctttttatccagataactgcccacagtcctgcgacgcaaaatgcagcaaatatcgaacaagcgttcaaagccctatgtacagaactgaacgcacaaggcagtattaacatcgttaattattcacagcatgatgaacaggatggagtttaacccatgaccccactgaaagccggtgatatcgcaccgaaatttagcttaccggaccaggacggcgaggaagtaaatttaaccgacttccagggacaacgtgtcctggtttatttttacccgaaagccatgaccccgggctgcaccgtccaggcgtgcggcttgcgcgataatatggacgacctgaaaaaagccggcgttgaagtgctgggcatcagcactgataaaccggaaaaactctcccgtttcgccgaaaaagagctgctgaactttacgctgctgtctgatgaaaaccatcaggtttgcgagcagtttggcgtctggggcgaaaaatcctttatggggaaaacctacgacgggatccaccggattagtttcctcattgatgccgatggcaaaatcgaacacgtctttgatgattttaaaaccagcaatcaccacgacgtggtgctgaactggctgaaagaaaacgcctgatgcaaagcaagacgccgggagaggaagccctcgcccggcgtctttttttattctcattgccttagtcgtcgaccgccaaaccatccggccaggcatgcaccactgctttaatcagcgtggccagcggaatggcgaagaagacgccccagaatccccacagtccgccaaagatcaccaccgacaggataattaccagcgggtgtaaattgaccgcttccgagaatagcaccggaaccagcaggttaccgtccagcccctgaataatcagatagaccgcaaacaggctccagaactcggtgccagcgccaaactgaaacagcgccacccccaccaccggaatggtcaccacaaacgcgccgatataggggatcagcaccgagaagcccaccagcaccgccagcagcaacgagtagttgaggccaaagagaataaagcctatccaggtggcgacgctgacgacaatcatctccagcaccttgccgcgaatgtagttggtgatctgctggttcatctctttccacacctgcccggcaagcccgcgattgcgcggcagaacgcggcgcaccgcgttgagcatctgctctttatccttcagcaggaagaagaccatcagcggcaccagcaccagatagaccgccagggtgagtaaccccaccagcgaggccagagagtacttaaccaccgagtcgcccaccgtcagcatccgggtgcgcatattttccgccatcgcatcgataatgccggcatccattaacgccggatagcgccgcggcagcgtggcggcgaaatcagagagcttatttagcatgcccggcatatcgcggatgaggtagatcccttgctgccaggctaccggcagcaccacaaaggccagcaacagcaggatgcccacaaagaggatcagcaccagcgaggtggcccaggtgcgcgacagaccgatgcgctccagacgaacggtcggccactccagcagataggccagcacgatagccaccagcaacggggccagcaggccgctgaaaaagaacataatgccgaaaccggcaagcaaaataaccagcagcgctatcgcctcagggtcgctgaatcgacggcggtaccactgcattaacatctcaagcataaaaccttccctgaagggccaagcggcgacaatccggggaattgtatcgaaatgtcacaaaaaagacttcgctttttgatgcgccgcagtcaaaccgttctccgccatgaagaacatattttcaaggcggccaacgccagctaaactcgctgggatgcggccagggaacattacgccgcacaatcggtcaaactggcacacccacattacaggacagaggttatgttcaggcagttgaagaaaacgctggtggcgaccgcgatcgcgtcgctgacgctgggttcgataggtcctgcttttgctgactccgcagataccctgccggacatgggaacctccgcaggaagcacgctgtcaatcggtcaggaaatgcagatgggggattactacgtccgccaactgcgcggtagcgcgccgctgatcaacgaccctctgctggtgcaatatatcaacgggctgggtatgcgtctggtggctcacgccaactcggtgcgtaccccgttccacttctatttgattaataacgaccagatcaacgccttcgccttcttcggcggcaatgtggtcctccactccgccctgttccgctactctgataacgagagcgaactggcctctgtcatggcgcacgaaatctcccacgtgacgcagcggcatctcgcccgcgcgatggaagatcagaagcgcaacgcgccgctgacctgggtcggcgcgctgggttcaattttgctggcgatggccagcccgcaggccggaatggcggccctgaccgggacgctggccggtactcagcagggtatgatcagcttcacccgccagaacgaagaagaagccgaccggattggcattcaggttctgcagcgctcgggtttcgacccgcaggctatgccgatgtttatgggtaaactgcttgacgagtcgcgctactcgacgcgaccgccggaaatgttgctcacccaccccctgccggaaagccgactggccgatgcccgtaaccgcgccaaccagatgcgcccggtggtggtacagtcctcggcggacttctatctggcgaaggcgcgtaccctcgggatgtacaccaacggcgacaacaagctgggcaccgatctgctgaacgcctgggataaaggcaatatccgccaacagcatgccgcccagtatggtcgcgctctgctggcgatggaaagcaataactttgaccaggcacgcaaaacgctgcagccgctgctcaacgccgacccgcaaaatgcctggtatctcgatctggccaccgatatcgacctcggacagaagaaaaccagcgacgccatcaatcgccttaaaaacgcccgcgagctgcgtactaatccggtgctgcagctgaacctggccaacgccctgctgcagggcgggcagcccggggaagcggcgaccattctgaaccggtatacctttacctataaagaggatggcaacggctgggacctgctggcccaggcggaaggcgcgctgggcaatcgcgatcaggagctggcggcgcgggctgaaagcatggcgctggtcggccagctggagcaggcgatttccctgctcagcagcgccagctcgcaggtgaaactcggtagcctgcagcaggcacgttacgatgcccgtatcgatcagctacgcgatctgcaggctcgcttccgtccctatcaaaaaatgtaaggagaccccatgaccgacgcggtaaaaatttaccataacccacgctgctccaagagccgcgaaacgctgagcctgctgcagagccgcggcatcgatcctgaggtggtgctttatcttgagacgccaccggatgccgggacgctgcgccagctgctgcagctgctgggtatggagagcccccgcgagctcatgcgccagaaagaggatctgtataaatcgctcaatctggccgacccggctctcagcaacgcggcgctgatacaggcgatggtcgacaatccgaaactcatcgagcgccctatcgtcgtcagccgcggccaggcgcgtattggccgcccgccggaacaggttcttgagatcgtaagctaactcacccgcgccgcgcttgcgcggcgctttttttacgtgggcgattccagatctttcacgccaatatctcccgcccgccggacggtgctactgttcatccatcgctcaatccactggacggatgaacatgaaaaagccgacctccacgccccatgacgccgtgtttaagacctacctctcccatcccgataccgcccgtgatttcctgcagctgtatctgcccgagacgctgcttaaagtgtgcgatctgcgtacactgcatctcgagtccgggcattttgtcgaagacgatctgcgtcccttttacgccgacattttgtattccctgaaaaccacggcgggcgacggttatatttatgcgcttatcgaacaccagagcacgcccgaccggcatatggcctttcgtctgatgcgctacgccatcgccgccatgcagcgccatctcgatgccggccacgatcgcctgccgctggtgatccctgttctcttctaccacggtctggtgagcccctatccgttctctctgcgctggctcgatgaattcgtcgctccggagctggccggccacctttatcacggggcgtttccgctggcggacataaccgtcattccggatgacgagattgccacccaccagcgcatggcaacgctggagttactgcaaaaacatattcgacaacgcgatctggcgcagctcctcgacaagctgagcgaattattattgactggactggcgacggaatcgcaggtacaagccctgatgcactatctggtacaggcaggcaacacgcgcgagccgattaaattcattcgcgagctggcgttacgtacgccgcagcataaggagacgttgatgacgattgcggaatatctggaacaacaggggctggagcggggcctggcgcaaggccgtcaggaaggacggaaagaagaggcgcagcgcatcgctgtcgctatgctgcacagcggccttccgcgcgacctggtcgcccggttgaccgggctgacggagcaggagctgactcccctggcggactaaagcttaaggatctctttcacgaaggggatcgtcagcttgcgctgagcggtaatcgaggcatgatccagctgatcgagggtcataaacagcgaacgcatctcgcgatccagccgcttcagcaggaagcggcacacatcttcaggcatctcgaagccgcgcagtctggcgcgcagctgcagcgcctgcagtttgtcttcatccgacagcggctgcagcttatagatctgcccccagtccagccgtgaggccagatccggcaggccaagattcagctgccgcggcggccgatcgccggtgatcagcagccgggttttgcctgattccaggatccggttatagagattaaagatggccatctcccagggctcatcgccggcgacgcactcgatgttatcgatgcacaccagcgccagctgttccatcccctccagcacctcgggcacaaaccacgtccgtttatccagcggcacgtagcctaccgcatccccgcgctgggaaagctccgcgcaggcggcgtgtaacaggtggctacgacctgccccttcacgtgaccagatataaatgtacccgctgtgttcctggcgcagtacgttctggagggcggcaagtagggaaggattatcacccggccagaaactcgcgaaggtttcgtcgtcaggaagatacagtggcaaagagagctgtgccggtgcgttcagatggacctcaacataggcttacagaaaaacgcgaagagtttaccacagatttaggtcaggagagaaccgggcgggatcgccgcccggtcaggcgatcgttatttaaactcttcgctatccgccgcgtcgaggaccacctcttccggacgcaggacgctgataagcttgaaaatcaggctgagggcgatgcccacgatagtcgccagcgccatccctttcagctcggcggcgccaatgtgcactttagcgccgctaacgccgatgatcaggatcacggaggtgaggatcagattctgcgctttactgtaatccaccttcgattcaatcagtacgcggatccccgaggcgccgatcaccccgtacagcagcagggaaacgccgcccatcaccggcaccgggatgatctggatagccgccgccagtttgccgacgcaggagagcagaatcgcaatgatcgccgcgccgccgattacccaggtgctgtagacccgggtaatcgccatcacgccgatattttcaccgtaggtagtgttgggcgtcgaaccgaagaagccggaaacgatcgtcgacaggccgttggcaaacatcgaacgatgcaggcccgggtcgcggatcagatcgcgcttaacgatattggcggtcaccaccagatgccccacgtgctcggcaatcaccaccagcgcggcgggcagtatggtgaagatagcaaaccactcaaagcgcggagtgtagaaagtcggcagcgcgaaccagtgcgcctcggcgatcggggtggtatcgaccacgcccatcacaaacgacagcgcatagcccaccagcacgccgatcaggatcggaataatcgccaggaagccgcggaacagcacggatccgaacaccgtcaccgccagggtcaccatcgagataataatggttttactgtccggtgactggccgtcggccggcagcagcccggccatattagccgccacgcccgccagttcgaggccgataaccgccacgatggcgcccatcgccgccggcgggaacatcacatccagccagccggtaccggcttttttgacaataaaggagacgaggcagaacagcacgccgcacataataaagccgcccagcgccacttcgtagcccagcggcaacagcagcagcaccggggagataaaagcgaagcttgatcccagataagcgggaattttgcctttacagataaagaggtacaacagcgtaccgatgccgttgaacagcaggacggtggccgggttaatgtggaacagaataggcaccagtaccgttgcgccaaacatggcgaacagatgttgcaaactaagcgggattgtctgtaaaagcggcggtctttcactcaccccgatggcacggcgcgtcatagtgtattcctctgagagtcgtctgttatttgctgtggattacttttattcaaaaaaaagccgactctcaaagtcggcttttttcgcggtatattttatttcgttccaaaaatcttgtcgccggcatcgccgagaccgggaatgatatacccgtgctcgttcagtcccttatcgacagaggcggtgtacagctcaacgtccgggtgggctttctccagcgcggcaatcccttccggtgccgccaccagcaccagcaccttgatgctggtgcagccggcgtttttcagcagatcgatagtggcgatcatcgacccaccggtggccagcatcgggtcaacgaccagcgccatacgttcatcgatgttagacaccagtttctggaagtaaggcaccggctcgagggtttcttcattgcgatagataccgactacgctgatacgcgcgcttggcacgtgctccagcaccccttccatcatgccgaggccagcgcgcaggataggcacaacggtaattttcttgcccttgatctgctcgacttccaccggaccgttccagccttcaatagtgactttctcagtctccagatcggcggtggcttcataagtcagtaagctgcccacttctgaggcgagttcacggaagcgtttggtgctgatgtcgtgctcgcgcatcaggcccagcttgtgtttgacgagtgggtgtttgacttccacaatcttcattctctttctcctctgaggggcagccacaaaaaaaatcgcgggattataccgctttttgcggattgtgccatacccatcttgcttgacgtatatcaagcaaagtgatttagagacaaaaaaaccggaggcgaggctccggcttgggtgcggggtgcagtccatacgcttacgcgggcctacgtgtattgtaggtcggttaagcgttagcgccacccgactacgacagcttctccccgttgctggcaattacctgctgataccaggcaaaggactttttccggctgcgtgccaacgtgccattgccttcattatctttatcgacataaataaagccgtagcgttttttcatttcccccgtgccggcggaaaccagatcgatacagccccagggggtgtagcccatcagatcgacgccatcctcgaccaccgcctttttcatctccgcgatatgggcggagagataatcgatacgatactggtcattgacgctgccgtccgcttcgcggacatcaatcgcgccaaagccgttttcgacaataaacagcggcagctggtagtgatcccagaaccagttcagcgaatagcgcaggccgaccgggtcaatctgccagccccagtccgactttttgacgtacgggttggagaccaggctggtggtttcatcataatcaagcaaggggttgtcttcggtggctttggtagcgaacgacatatagtagctaaagccaatgtagtcgacacagccctcggttaacgcctgacgatcggcttcggtgatatccagagtaaagccgcggcgggcaaaatagttgagcagatgctgcggatagcgaccgcgcacgtggacgtcggtaaaccagtaacggcggtgcatggcgttcatcgccatcatcatatcgtccggggcgcaggtcagcggatagatggggcacatagcgatcatgcagccaatctgcagcgccgggttgatctcgcgcgccgctttcaccgccagggcgctggccaccagctcatagtgcgcggcctggtacatcaccggttcccggtcttcatccggcaaatatttcaaaccggagttggtgaagggggcaaagtcctcatggaagttggcctggttgttgatctcgttaaaggtcatccagtacttcactttatgttgatagcgggtgaagacgaccctggcaaagcgcacgaaaaagtcgattagcttgcggttgcgccagccgccgtactcggtgaccaggtgataaggcatttcaaaatgcgacagcgtaatgactggctcaatgccgtgtttcaggcattcgtcgaacagatcatcataaaactgcaggccagcctcgttgggctccagctcatcgccctgcgggaaaatacgcgtccaggcaatcgaggtgcgaaaacatttgaagcccatctcggcaaacagcgccaggtcctgtggataacgatgataaaaatcgatcgcctcatggttcgggtagtttttcccggccaccacgccgtcggtaatttcccgcggcacgccgtgggcgccggcggtcatcacatccgccacgctgatccccttgccgccctcctgccagccgccctctaactgatgcgctgcgaccgcgccgccccacagaaaacctgctttaaatccggacatagtctctccctaatgtcgatcgtcgtctggcgaacgatacagctgattaaaatggtaaaccgcaccaatcaggccggcatcgttaccgtgactgacggtatcgagatagtcggcaatgccgaaccaggccagatgctggcgcagtagcgtcagaaatcctgggcgttccacaacgccgccaccgataaaaatggtctgcggatcgaagatatggacgaggttataaaggccatggcccaggccattgaagaactcggcgaccagacgctgacaaaccgggtcgccggcgtcatagcggtcgaaaatcagttcgcctgtcacgctatccagcggcgcgccaatatgttgcgcatagcgatggcgcagcacccgcagagtgcagttctcattcattgaatagcgacgaggatcgcgtccgccgggacggtcggtaagcatatagccgaattcgccggcacgaaaacgcgccccgttgatcagctggtgttggcagaaaatcgccccaccgatgccagtaccgatagtgagcaccagaaaattggccatctccgccgctttgccctgccagcgctcggccagcagcacacagttggcgtcgttttccaccgagaccggcagcccggttcgcgtctcgagccacgatttcatggcgaagttatcaaatcgacggatagcgccgcccatggtgataagaccgctgtgcggatcgatatagcccggcgcgctgatggctattccttcacacgacggatgggccgccagccacgacagcattgcctgtaagatccgatcgccatcgctgtcattgattgactgcctggcggtttccagcagcctgccgtcgcgggccatcacgcccatctttaacgcggtgccaccgatatcaaatgccgcaatcttcattcatccctctcctgacccgcgtcaatcaccgacaaaatgcgtggcaaaccaacacggaaaccggtttcagtcgtataatgaggattcctttacgtagaggcaagcaccagactgtacccggtttcattttcgtgagcagtatcaaatttaaccattcatcagcggttttacgccaactgtaaagcaggctcgcaaacgtttgctttccctgttagaattgcgccgatttttcttgcttaccgcaaacgcgtggagacttcgcagtgaccgataaaacctctctcagctataaagatgccggcgtggatattgatgcaggcaacgctctcgtcgaccgtattaagggcgtggtgaagaaaacccgtcgcccggaagtgatggggggactgggcggattcggcgcgctgtgcgcactgccgcagaaataccgcgagccggtactggtctccggcaccgacggcgtcggtaccaagctgcgtctggcaatggatctgaagcgtcacgacaccatcggtatcgacctggtcgccatgtgcgtgaacgacctggtggttcagggcgctgagccgctgtttttcctggattattacgccaccggtaaactggacgtcgataccgcagccagcgtcatcaacggcatcgccgaaggctgcctgcagtccggttgcgcgctggtcggtggtgaaaccgcagagatgcccgggatgtaccacggcgaagattacgacgtggcgggtttctgcgtcggggtagtggaaaaatcagaaatcatcgacggcagcaaagtgaccgatggcgacgtgctggtggcgctggcgtccagcggcccgcactctaacggctattcgctggtgcgtaagatcattgaggttagcggcgttgacccacaaactaccgaccttgacggtaaaccgctggccgaccatctgctggcgccaacccgcatctatgtgaaatcggtgcttgatctgatcgccagcgttgacgtccacgctattgcccacctgaccggcggcggcttctgggaaaacattccgcgcgtgctgccggataacacccaggcgatcatcgatgagtcctcctggcagtggccatccgtcttcaactggctgcaaaccgccggtaacgtcagccagcatgaaatgtaccgtacctttaactgcggcgtagggatgattatcgccctgccggcagcggaagcggacaaagcgattgccctgctgaatgacaaaggtgaaaacgcgtggaaaatcgggtatatcaaagcctccgattccgaacagcgtgtggtcattgcatgaaaaacatcgtggtgctgatttccggtagcggcagcaatttgcaggcgatcatcgacgcctgcggccggaaacagataaacggcaccctgcgtgcggtattcagtaacaaggctgatgcgttcggccttgagcgcgcgcgcctggccggcatcccggcccatgcgctggcgcaaagtcagtttgccgaccgggaagcgttcgatcgtcagctgatgcatgaaatcgacgcctacgccccggatctggtggtgctggcaggctatatgcgtatccttagcccggcgttcgtcagccactatcagggacgtctgctgaacatccatccctcgctactgccgaagtatcctggcctgcatactcatcgtcaggtgctggagaacggtgacgaggagcacggtacctcggtgcacttcgtcaccgatgagctggacggtgggccggttatcctgcaggccaaggtgccggtcttcgttggcgacagcgaggaggaaatcacggcgcgggttcaggcccaggaacatgccatttatccgctggtcatcagctggttcgtcgatggacgtctgcgcatggcaggcaaccacgcctggctggatgagcgacagcttcccccgcagggctatgccgccgacgaatgaacaaccagccccgcatgagcacatcgcggggcttttttttaattaaaagtgtttactaatcaaacatctcacagaaataattcttcttactgtcatattgttgtgacacagtaaatcgctacgcagaaaaattcgtcataatagtctacgtcctgtgagtaaaacggagtgtgagcggtaatgggccaggaaaagctatacatcgaaaaagaactcagctggttgtcttttaacgaacgcgtgctgcaggaagcggcggacaagagtaacccgctgattgagcgcatgcgcttcttagggatttactccaacaacctggatgagttttacaaagtgcgcttcgctgagctgaagcgccggattattatcagtgaagaacaaggcagtaccgcccattctcgccacctgttaggcaaaattcaggcccgcgttctgaaggccgatcaggaattcgatagtctgtataatgaactgttgctggagatggcgcgtaaccagatcttcctgatcaacgagcgccagctgtccgtcaatcagcaggcctggctgcgcaactacttcaagcagtatttacgccagcatatctcgccgatcctgatcaaccgcgaaacggacctcgtgcagttcctgaaagatgattacacctatctggcggtggagattatccgcggggaaaacatcaactatgctctgctggaaataccgtcggataaagtgccgcgcttcgtgaacctgccgccggaagcgccgcgtcgccgcaagccaatgatcctcctggataacatcctgcgctattgcctggacgatatttttaaaggcttctttgattacgatgcgctgaacgcctactcgatgaagatgacccgtgacgccgagtacgatctggtgcatgagatggagtcgagcctgatggagctgatgtcctccagcctcaagcagcgcctgaccgccgagccggttcgcttcgtctaccagcgcgatatgccggatgcgatggtcgaaatgctgcgcgataagctctccatctccaactacgactcgatgctgccgggcggccgctaccacaactttaaagactttatcggcttcccgaatgtgggtaaggccaatctggtcaataagcctatgccgcgcctgcgtcatctgtggtttgataaattccgcaacggcttcgacgccattcgcgaacgcgacgtgctgctctactatccctatcacacctttgagcacgtgctggagctgctgcgtcaggcctccttcgaccccagcgtattggcgatcaaaatcaacatttaccgcgtggccaaggattcgcgcattattgacgcgatgatccacgccgcccacaacggtaagaaagtcaccgtagtggtggagctgcaggcgcgcttcgatgaagaggctaacattcactgggcgaaacgcctgacggaagccggagtccacgttatcttctctgcgccaggtctgaagatccacgccaagctgttccttatctcgcgtaaagaaggcgatgaggtggtgcgctacgcccacatcggcaccggtaactttaacgagaagacggcgcggatctacaccgactattcgctgttaaccgccgatgcgcgcattaccaatgaagtccgccgggtgtttaactttatcgagaacccctatcgtccggttagcttcgactacctgttggtgtcgccgcagaactcgcgtcgtctgctgtatgagatgatcgatcgcgagatcgccaatgcgcaaaacgggcaaccgtccgggattacgctgaagctgaacaacctggtggataaaggtctggtggaccgactgtatgccgcctccagctccggcgtgccggttaatctgctgatccgcggcatgtgctcgctgatcccgggtctggaaggtatcagcgaaaatatccgcgtcatcagtattgtggaccgtttcctcgagcacgaccgggtctactgttttgaaaacggtggcgataaacaggtctggctctcctctgccgactggatgacgcgtaacatcgattatcgcatcgaagttgccgctccgctgctcgatccgcgtctgaagcagcgggtgctggatatttttgatatcctgttcaacgatacggtaaaagcgcgctatcttgataaagaactgagtaaccgctatgtgccgcgcggcaatcgccgtaaagtgcgcgcgcaaatggcgatttacgattatctcaaatcactcgaacaacccgactaacctatgccaataaacgataacacccctcggccgcaggagttcgctgcggttgaccttggttcgaacagttttcatatggtgatcgcccgtgtcgtcgacggcgccatgcagatcatcggacgcctgaaacagcgcgtacatctggccgatggcctcgatgaaaactcggtgttgagcgaagaagccatgacccgtgggctgaactgcctgtcgctgtttgccgaacgcctgcaggggttctccccctccagcgtctgtatcgtcgggacgcatacgctgcgtcaggcgaccaacgcggcggagtttcttaaacgcgcggaaaaagtgatcccctacccgatcgagatcatctccggtaatgaagaagcgcgcctgatttttatgggcgttgagcacacgcagccggagcgcggccgcaagctggtgattgatatcggcggtggttcaaccgagctggtcattggcgaagattttgagccccgcctggtggaaagccgccgcatgggctgcgtgagcttctcgcaggcctatttccctggcggcgttatcaataaagaaaacttccagcgcgcgcgcctggcggcggtgcagaagctggagacgctggcctggcagttccgtattcagggatggaccgtggcgctgggcgcctccggcaccattaaagccgcccaggaagtgctggtggcgatgggcgagaaggacggatttattacgccggagcgcctcgagatgctggtaaatgagctgttgaagcataaaaacttcgacgcgctcagtctgcccggtctctcagaagaccgtaaagcggtctttgcgcctgggctggcgatcctctgcggtgtgtttgacgcgctggccatcaaagaacttcgtctgtccgatggcgcgctgcgcgaaggtgtcctgtacgagatggaaggccgcttccgccaccaggatattcgtagccgcacggcacagagtctggcaaatcagtacaacatcgatcgcgaacaggcgcgccgggtactggaaactaccacccagatgctggagcagtggcaggagcagaatcccaagctggccaatccgcacctcgcggcgctgttgaaatgggcggtgatgctccatgaggtagggctgaatatcaaccacagcggcatgcatcgtcactcggcctacattctccaaaatagcgacctgccgggcttcaatcaggagcagcagatgctgatggccaccctcgtacgctatcatcgcaaagcgatcaagctcgacgatctgccgcgctttacgctattcaggaaaaagcagtttctgccgctaattcagctactgcgcctgggcgtactgctgaataatcagcgtcaggctaccactacgccgccgacgctgcgcctgcagacggaagctcaccactggacgctgacgtttccgcacaactggtttagccagaatgcgctggtgctgctggatctggaaaaagagcaacagtactgggaaggcgtgccggaatggatgctgaagattgctgaagaagagccagacgcctgatcgtatctctggctatcaaccgagccgggcgcttacgcccggctttttgctgctcagccggtcatctcctccgccaactgcgtcagaggtaccggtaccccgatatcatagccctgcatataatcgatccccagcgtgatgaccgcctgacgtatttccggcgactccacatattcggccaccacctgcatgttcttcatacgcgccagacgacaaatagagtccacgacctggtaatcaagactgctggcaagcagattgcgaataaaactgccgtcgattttaagaatgtcgacgttcattgtttttaaccgggcgtagctggcgtagccggtaccaaaatcatcgatcgccacccggcagcccagcgcccgcagatgttctaaagtctggcagaccagctcgggattgctgagcgcgtagttctcggtcagctcgaaaataatctgccatggctcaatgttgtaggcctgcagcagcgcttcgacctcctgaggaaactggctgcggctcagcgacaccggagaaagattgatcgccagccgcagaccaggcagcgcccgccggttggcgtccataaaggccagcgtatgctcaataacccactggtccacccgcgtggacagcccaaactcgtgcgccaccggcaagaactcgtttggccccgttagctcacccgactccccttccatcctcaccagcacttcatgatagcgatcgccgcgaatgccctggataggctgcgccatcaggacaaaatggtcatgttccagcgctttgagaatgcggttcatcatcacgactttatctttcagatcctgctgaacatggcccgcgccgcggcgctgtaaattttccggatggccgctggctaacgacatgtcggcaatggtgttcaactcgccaagcagtaaatacagatgcttgaccggcgagcgaacgttgcaatagctcatgccgatccgcggctgcagggggaccccgtcccagtggaaacggaactgtcgcagggagcggtcaattaagtgaatgcgcgcctggtgcccttcgctattgagacggaacactaaatcgtgaccggcaagatgatataccgcttcgttgggctgcagcagcgttctcaggtggttcgccagcatttgcttatactggattcgcaaaagtaccccatagtggcgccccagcaattcaagctcaggaatgcgcagaaaacagagcgtcgaccagctcgtgccgttgagcgcccggctcagcgcccgcaagttcggcatatgaaccaccgggtcgaggaaggccatctgccggacgcgagcgtagatcagccgctgctgtgtcgccagcatcgccgtataggcgacaataaacgagaataccagatagcttgatgacgtgatcgccaactgggtgttatagcttgggtaaattggtaagtaacggtaatgaaaatggatcacggcaatcagcaccggcgtccagatcagtgagataaagcgatagccaaaacgcatggcaccccagagcatcaccggcatcagcaatgacaacgtataattcgtactaaatatggtgctgctatcattaagcggcatcaataatagccacagtagcagaattaataccgtcgcccagcaaataatttcaattttttttatttttggatcaatttgtaagcgaacctgagaaataaagccgcgtaaatgaaaaggattacgaatgacccgtaacacaaaataacacagcggcatgccggtcaggcaccctaccattagcgcctgaaaggtgattaatgaacgtaaactaaatggcgtaacgccggtcatttccgttgtgcgcggatggagtccaagatattcggcaatctgtgacaaaatcagaaaaatgaccgaggggagcagcatttgccagaacagacgatgcggcatcagtcggacgttgccgtgtgagacctgctgacgctgggggacaaaaatgcggtagccgccccagcagagcacgcaggggataaggaaatggaacagtacaccgatggactgctcaaacatcatgccgtgggccagagttaacagcaggccaataataatgccagggatcgccgcccagccaaaaaacatcatcaggctgagcaccagcgccaggggaagataatacaaaaataccatatgaccattgagcatggtgtaggtattcgcccatctggcgaccggtaataacagcgcaggcagaacgagcggtaaagcccaccacttgtcgcgatattgttgatagtattttaataaattcataggtgctctacagagtgcctctgctcccgcgaggcatattcaggcaggcatccaaccacccatgctgaccgcgtaaataataacgacacggtaacgtccgctgattttagtggccaagagaaggagactattgatataaatcaacaaatgctgacgccaacattaataaatcttatttttcccgacatttcacggctaataaagtgagcatgtaaatacgacgattatcttatataacattaattaatgttttcactgccgcacttttacatctgcatcaattgaccccatctcgttcctgtgccttaatacccccatcgcccatcttcgggtatacttcaaggatccttttgtgagtcaggcacccagtatgcgtaaacgacatcgatttaaccgtcgcatgacccgtatcgtactgcttatcagctttctcttcttctttggacgctttgtctactcctccatcggcgcctggtaccatcatcaggataaaaaagcgtcgcaggagtcatcgctcaccgtcgagccctccccccgcgagtaatcctttgattctaatactgcaagcgccacactccgcaggcagagccgctcgctgctgaagtactgtctttgatgcggtaattttgccgtcggcgatttataagcgcacggtatgcagcaggcgcagcatttcagcgataccttttgtcacaattttgtcctgacgcatgactaccgccagctgtcggtatagccgcggcgccagcgagtgtacgcgtaatccgtcgcgatcctccacccgctccaccgccatgcggggcacgatgctgtagcccagccctgcccgcaccatgcgcttaatcgcctcgatgctccccaactgcattaccggcgtcaccgccagtcccgccgagcggaaccagcggtcaatcagatcccgcgtgccgctacccgcctcgaaggcaatgagcggctgcgcctgcagctcggcgggagtataaaccgccggcatctccgtctcgcggctggcatagatggtcacgaactcctcatctaacatcgcagtcaccgccagactgcgcccctgcacgggcagcgtgaccagcccgagatcgagccggttttcttccaccgcgcggacgatatccagcgtgttgccggtggtcacccccaccgtcagcagcgggtgctgctgacgaagatgctgcagcagcggtggaagaagatgaatgcaggccgtcgcgcctgtccccagcgtcaacgatccattaacctcctgactgaatgcgctgaccgactgcaccgcgctattcaccgcccgatcgatctgctcgctgtgggccagcaatgccattcctgccgccgtcgccttgatcccacgtccggttcgctccagcagcctggtctgtaaaaactgctccagctgacgtacctgcaggctgacggcaggttgggagatccccagcgcgtcggcggcggcagaaaagctgccgcgctgtacgaccagccggaaggtcgccagatttcccaggttcagtgttgtcataaaagtttctcttataccgcgcataaggtggccgctctgccagaacaatagcctgccgggtatgctcaggacaactgtcttaacggaatgaaaaaccatggaaataaacgctattccccgacgccttgccttcaccgcgggcggtcagcaactcatcaactgggggatctctttttatatgcccggcacctttgccggggctatcgccgccgacaaaggatggtccttgccgcagatctatctcggcctgacgcttgcgatgctgatgatggccgctgtctccccgttcgttgccaggctgctggctcgctttggcggaagactggtggtcaccagcggtaccttactgatagccgccagctgcgccatgatggcctggcgcccttcgctggccggctggtacggcgcctggctgctgaccggcatcggcatgcggctctcactgtatgatgcgctgttcgccgcagtggtgaatctgtacggtcagcaggcgcggaaaactatctctcatatcactctcgctggcggtctggcctctgccctcttctggccgctgggcgaggcgttattaaccatcatgccctggcagaatgccctgcggatctatgcgctgtttggcctgctgagcgcatggctgagttatcaactgcctcgccagcggctcagttcagcggcgaaatcaccagcctcgccagcgacagcagagggcgaccggcgtaacggggcgcgttacgcgatctttattgcgctgatcaccttcatctctaacggtacctctacccatctgccggagtttatcagccactttggtctgccggttgccgtcggtatgctgtggggattcggccagaccggcgcccggctgggggaagtgctggccggtccccgggtcacctcactcacgctaacgcgttttactgcgctcgccatgccgctctgttttctccttggattgagcagcacgacctttgccggatgcgcagccgggtttgtgctgggctatggcgcgattaacgggctggtgacgattgtcaaagcgacgctgccgctggcgctgtttagcgcagaaagctacgccagccgcacgggtctcctgctgatccccgggcaactgatggcagctgtttcaccctttgcctacgcatggctgaaccaccggctgggcattatcggcggaatgtgggtgtccaccgggttaacgttgatcgttgccggactggcgctggcgatggtgcgcgaggcgggtaaggcgcaggatgaacgtaatgtagaatatccggcagcggccgttgaccaaccgatagccaaaaacaaccttgctgaagagtaaacgtggatcactacgcccttgataatttacgcctgcgcttatagccatatggcaggcattattcatactataaatttttaatgaaaatacattcaccaaatcaataatgaaatttttaagagaatagcagggcatgctgtcacctgcgaaaaataacgataccgcctgtatttttcgcttgcataatgatccaaaaaataaagccagtcgccatcggtaacattagccacacctccggtaacacaattagctttactctcttcctcatcgaaaacgttcgagcatagcaaagaatgagcgctaattttaataccgtagcaaaacccggcggcaatcgatgcaatctggcctgtcggtattgcttttatctggaaaacgaggttccgcgtccagggtatgccaccatggacgacctcacgctggaagcgtacattcacaacaccatttcatcgaccccctcgcaaaacgtcgagttttgctggcagggcggtgagcctaccttatgcgggctggatttttttgcaaaggtggtcgagctccagcagcgttaccgtggtaacaaaatcatcgccaacagcctgcaaaccaacggcatcttgctgaacgataaatgggctcgttttttgcgtcgtcatggatttctggtcggattatccattgatggccctgcgtcactccacgacacctggcgtacgacgggctgcggaaaacccacctgggaaaaagttgtgcaggccatacgctgcctgcagcagcatgacgttccggtaaatgccatggtggtggtcagccgccagtctgcaagccaggggaaaagtctctatcgctgcctgagccgcgagctaaaccttcaccatctccagtttattcctctcgttgactcccctgctccctggtcagttacccctgagggctggggcaaatttttgtgcagtgttttcgacgactggctggaaaacgatgttggcagggtgtttatccagtactttgataatctgctcggcgtatgggccggccagcccgccacgctctgcaccatgcagcctgtctgtgggcagagtttactggtggagcaaaacggcgatgtctacagctgcgatcactttgtctcagcggaatataaactgggtaatctgaagcaagatgctatggcagcgatggcgagctcgccatttcagcaacagttcgggaagcaaaagggccaactctctgcccgctgtcagagctgccactggcgctttgcctgccatgggggatgccctaaacaccgttttaccatccatgacgacgaagcacagaattacctgtgcagcggctatttagcctttttcggccatatcacgccctatatgaacgtcatgcgaaggcttttattaaattgccagccgcccgcgctcattatgagtcttatcccggagattcggcaaaatatattacaattaacggagtctgaagatgaaagaaccaaataaaatagatggaaatcgccgccatctcctcaaaggtctggggattgccgctgtcgtgagcctgttaccagagacgggaaacgccgcgcaaaataatgccgccccgaaagcggcatgggatattcctttcaccggcgaaatccctgacacactgcccgaaggctacaatattttactaataacctgcgatcaggaacgttatttcgagcggtatccctttccggtgccgggccgggaacgcctgatgaaaacgggtatcacttttaccaatcatcagaacacggccaacgtttgtacgccatcgcgctctgtcatgtacaccgggctccatatgccgcacacccggatgtttgataatcttggcttcccctggatgaattacgatctggacccggaattacgtaccgtgggccatatgatgcgtgaactgggttattacacggcgtataaaggtaaatggcatcttacccgggagatcgatcagccggtcgctggtaaatcggtagaagaaatggacctgggcgagatcccgacgccgcgactgcatgaaattatggaaaagtatggtttctctgattatcacggcattggcgatgtcatcgggaaaagtaagggcggctatttctttgattcagtcaccacggggcagaccattagttggctacgtaacaccggccgcccgctgaatgatgaaaataagccctggttcgcggcagtaaacctggttaacccccacgatgtcatgtttatcgacaccgatgagcatggtgagcaggtgcagtggaaagggccaatggataaagaaaaccacaccctgctgccaacccaacccccgcacaaccaaatctatcagcaaagctggccagactatccgctgcctgcaaaccgccaccagccgctcgatgagcctggcagacctgccgcccataaagagtaccagaatgccagggcggtgatggagggacagttccccgatgaagaccggcgctggcgcaaattactggattattatttcaactgtattcgcgataatgaccagcatcttgaggcgattctcaatgagctggataacctgcagctgacgcaaaatacgattatcgtctttaccgccgaccatggggaactcggaggctcccaccagatgcatggtaaaggttcctcggtgtacaaagagcagatccatgtgccgatgatcattcgccatccggcgtatccgggaaacatccgctgcaacagtttgactaatcatctggatttagtaccgaccctgattggtctgactggacgcgatcgctcgctgcgagagaaagtcctggagggcagaaaaggccgggatatgagcccattactggcgcatcctgagcaagcgggcttaaatgcgctgcgtccgggttcgctttattgttacggcatgatcctgtatatggatgcgcaatacacggcaaaattcagaaagctggctggagaaaaactcccgcacgatcaatttaaaaaagcgatcgcgtcactccatcctgatttttcccatcgctcagggatccgtatgatcaacgatggacactataaatttgcccgctacttttcgctcaagcagcatcatattcctgctaccctggccgagctgctggagaataatgatgttgaacttttcgatctggttaacgaccccgaagaaaatcataacctcgcccgggagccagagaaataccgggatctgttaatgacaatgaacgataaactcaatcagctcactgccgctgagattggcgaagatgatggcagctatatgcccccgtttgaaggaagccagtgggacatgtcggcggcccagatgcatcaatatatgcgcgattagcgcttgccgtcaggtgggagaccttaatgtagcagctataaaaaaaccctctgtaaacacagagggtttcgtttcattcagctaacgccggggattactcccactcaattatttacggagtgcataaccaattgactggtaacaattttctatgaactgattttcaccgtaccgttttatataccgtcaccggaaatcagtgccccgattttttcttcttcagtgagtcgtattgctgttcgcaggattctcctgcaatccgatacttttcagcctcagttgctgttgcgttgtaaactcggttgctttcttcaagcatgtcggcgagcacacggatgacctggctggctggcgtgccagtggggaaagatccggtatagtgttcggcgagtcgcttggttttgtcaagctcggcgcgcaggccgtcagcagcggtattagcatgctcagcatcaacacgcgccacatcaatacgggattgtgcttcacgttcaatttgtgttttctcctgatcacgttgtgacctggccttatcatcagcctctttctgatctgcctgagccttagcatacccggcagcgtactggcggctgccgttcacattccaggcaaccctgcagccgattactagagcagcaagcatcaatatgataagcaactgtttccagtacgctttgacgaatggccagatcataccgccagcaccttcctggccgacaggtaacgcacacggcgatcgtcgataccattctggccgccattgatgatctgtgtgacgcgcatcaggtcgtcggtgtacttaaggcatccatatttcacgaagtaccaggccgcgctccgcgctgcatactcgtcctgcgccagtagttccggctgcttaaccagatccaccttcagggcagccccgcaatcgcggtagttgttcagtccggtggtctggatgagaccgcgcccgcggtaaaaccagccgtcggtaggcccgttattccccatacgtttgctgtacaccagattggcaatggcccgctgcctctccagcggcaaagagggctcaccctgacggcggccgagggaattagcctggccctgtgtcagtcgcccggaacggacgaaaccagccagccccgccacgctgtaattgaagctctcaacgagctgggtaaagccagtgctttcatgcccggcctgggcaataaacatcgcctgatccagcggcttgatgatgccaaactctttcatggccgccacgatgtgcggatgccagcgtgtggccagcgccaggctaacgccggcagctttctgaaactcgttaatgtccatgttgcgacctcgatattttgaatatttgcacgacgttgccgcgcgtcttcagcaccgcggcgaacatcacagcattgataacgacctcagaaagatctgcggtcatagggaagtggtacaggtatgagtacgcggtgcgcagcgggatactggctgccgccacgatgaggaaataggctatccacccaccccagcggcggtggcgcgatccgttgcgctggaagaacatcacccgcagcgctatcccgccgcagatgatggaattagcgataagcagcagatcatggcctgtcatcgtcttttcctcccgggattaaatcgcgcggattgtcagagcggtgatacagccatatcccaacccgcacagcgacaattgacgcaacgaacgcgccggcagagtagacgattccccgctcgaaagagtcctgagtgattgtcgggaacatgctggccagcccgataaggaccgatgccgttggcttgtagaagagaagaccgcagagaaagctgagaagggacagaagaacgcggcgccagataggatattcaaccgctgaggtgacaaatattaccgccccagcgagtgagccaagcgccacctctggcggaactccggcgacgactgcagccagtgctccgtagctaagcccctgatttaccgtatcagcggttagcgttcctgacatgatgaccaccgtttactatgcatgatgaacctcctgaagttggtaagctcatcatacacaataaaccgtttatggataaatggtaactattctattaattgtttattcccatttaaccaatgaatgccatggcttgtggtttttaaaaccgtgttcagtcctcaatacgagcggatatgtcgctcgctttatgttatacgtgatgatggtatttttaccacagagaacaaaaacaggggttatcatgtcatttatagttaaagtcaccacagcgcaaagaacatcatttccattattcaatgttaccttaggcgagcaaagtaaacccatagatgttttaattgatgttttgaatattgtttctcttggtagagataacaatggaaccgtggagtgtattgcaactattgatggtgtttctggaggcgtaatagtttatccgtttgtttactcagggagcgggcacccactggatgatgctgaggagcaggtaaaagcaatgttaacaacaaaataaataatccccgccatctcggcggggtagcatctttattctattatcgagaagttgctcaagtatgtctctttagccaaagaaaatacctcataggcatccccactgagagtacctacgttaaaatcgaatattttattttccttggcatctccatcataaattccgatagtactgatataaagatcgccatctttcacggtgtcatctatgtaggcaaaacatcctggcttcgactcgccatagcgagagctcgtcgatatgtaatcacctttcatgtaagtcatagcgttccccaagcagctctgaagatagaatatgcgtatgcgctatttagataagaagtgtagtctccggcaatatagccctgacttgagacatcccacttccttaccacggcataggatgatgcaacactaaaaactaaataataattaccgtttattaacatgtactcaccagcggacagtagcgagctccccatcgcgataacggtttctcccgccactatggaattatagagagagtaagccggcccccagccactgtttgatgggagggttcccgtagcccgaatgaagttgtcttctccagtcgtcgcggagtacatcatgtatggggctacaaacgaggtacggtagtaccgggtattgttcgctgatggccagccgcgtggcgtggtattgtagggtataccatctgtctgcaccccgttgtagacctgctgcgccattctggtatagacgcagccgtttgaggttttaggcacgtagaggaagctacggcctatgttttcatgattatttactccaatgtcaacgtaaatcattcctccggttgtcacaaaggaatcaatgcagttttttaatgtattgctatatacgcgcgtataaccaactgcattcttccaacggataccctggcttgaggtgatattcactcctgttatcgtgcaccctataactgaacagttatacgccgctgtatttatccggttaaagaaaacaccagagttactaaatcctgaaatacggcatgaagatattgccacgtttccgcatgattcgatgaacacccctacgcttacatcacggatagtgttattactaacaacaacatcctctgcaactccctgtccagtttcgtcagttacgttaccaaagatatcaatgccattatcaccgcaggaggttacggcacatcccgtaatggtcatcccgttggggcgttcacactgaatgccaatatatccaacattgtgaacgtagcagtttataattcttgagttagaacagccataaaccgtattgttagctcggcgtaaataaatccccccagaagtgctatctatcgccttaacgttatcaatagtgacattatccgagtccacgatattaatgcaggtaatccccgttccggcagcggtgccacggctaccgttaagcgtgatcccctgaatcttgcagttatcggcagcgccttcccagttagtgatgattgcaccactggatgagccggtaaaactgccatcaagagtgattgatccgccgcccataagggtaacaccactgcgcatgcacagcgcgccacggcccgcagcaacctcaccggggatcaaagttgaatccggattgagagtgacagtgtggtgtccgccaataagaacgttagtagggccaacacctgacaggtaatttgcgtgggcttcatcaattgctgactgaatatatactctatcgtcgttggttcctccaagagcaccatgcatttcaggagttataaaacttaacccaccgattaatgcagccccatcagttcctgaaagctttattgcgagatcagctgtatctgtctgcgctgcaataggaacgaaacttccaacgttattgcatcctacaagcatatttgatctgagattagcgtttgcatacatcggcacgcttgattctggaaccctgagcgtcctggaaaagaggtcttcagaatgctcaattgattctgatacggaattatctacgtaatttttagtagcagcatcctgctggtttacaggatccttcagattcctgatttgattaccaagagcatcgtaatagttcgccagccatgatggtttcctaagtgatagaccagaccaccatccatatgcctgctgcaccagcattgtcagcttatcgaaagcatcttcgtggatctcaggaaagaagcccccctggttcctgatgctggcttcctgcgtaaccggcgtgctgcgctcgatagagattttgtaaccagctggcagcgctgatgtcagaaccaccttccccccgttgtaacggttcacgccggtaaccgtgtagtcggtaccgagtgttagcgtcacgatgctttcggaggtatccagggtctgcaccagcaggtggcttttatcaagaatgcggaacgtaaaatcgtattgggtagtggcgccgttcccggtgtactcgttacggcttacctgcgttgaaactgtcatagtctgctccagtggtcagcgctggcgcgcgtgcatagaagcattctattacccatcaaaccatatatgaataaaacagatcaaaacgagcaaaaacattaccattaaggtaaataaaaaccttctggaaaaccctgttaccttttgatatatgtatatatatacagtatttatcggagtaatcctaatgccagagcggtaccagtatcctgtcgacgaaggttttgcggatcgtattcacaccccggaaggggtcagatccctggttgtaaaatcacaactgatggagttgctcagggagatggagcgagacggccacgatgtcagcggtgcggcggcggaactggtggcactggttaactatgtgacaagctcgcagttgtcgatgcgggagctgcaagcacacctggatttctgcgcaatgcagttgcggcagcaactcagatagggattgaagccaggaagcacatttaaaataattcttgacggacttcatgggtggcttaagattaccgtattggtaattcaaccatgtgttgagtatccgcttgcattaacgtttgttagaggtatgtatgagcagaagatatagcaaagagctggctttagagtcagggagccctttgggtatcgctcctcgctctgactactccggctttgtgaaaagagactcatcaaccggcaagttcctcgaacaagatatgcgggtggtcggtgatgacttacgtaggtccgcaacgaccatttataaaaagtacatcataaaagatgggaaaagagttgacgcccctcaaggaaagatgtttgccgtaactctacataaggaaggtcttgatgctgccggaacaccaaaatcaagttccccaagatacgacaaatacgccagactttactggcaaacaaagcgataaccccgaatttgaagaagtcgaggaagatctaagtaaagagatcattgaacatccggatgctttttcgcgtgtgctagacaggcctgaaattcaagaaatcgttgttgctcaccacgcatttcaaggcccgctgcctcctccatatcttttacgtgggtatcaggaaatcttacctgatgcccccgagcgtatctttcaactaacggagagagaatttgctcacaggcataagatggaggaaaaagcgcttgatggggccatcaacagggataaaagaggacagcactacggtctaggcgctacaatctttaccgtcggttgtgccaccgtcttaggcttgaccgggcatgaagtgttggcaggaacggtcatcggcatagtagttgcagtagcttgtatttttgttctcaggcaaaaaccaatcatcaaaaagaaaccagagaataacgaaaaacctgatgaagaatagcccgggccacggtctttttgtggcttccttcctggttcgatcctcaatcaccatacctgatatttcggtaataacactcgcttaattattaccaaaatggtaaatttacaacccatttcccttgtgccatagtgatcgggcatcggcaaaatccggtgccgggattggtctcccggattactacaaaggcgcacacaccgcgcgagcggtttttttatgcgtaaagcacagttatacccagattatggtgggctgtgtgggggcggagaaatccgcgccgggtcctttgtagccggtaagaccaactctgcacagttcaccaccacctgattggtctcagcggtggtgatcaacctaactacaaaggtgatcacaatgttagaacaaactgcaccaaccgtcttctcattcgaatctacagttaacatccgcatggtcatgatcgatcagcgtccatattttgttgctcaggatgtttgtagtgctctcgaaatccaaagtgttgatgttgctttgcgcaaagtcgacagcgatgaaaagggtacgtattcaatacggacccctggtggataccagtctttaagcgttgttaacgagtcaggactttactggttaatgctccgctgccgtaaagcggccgtagaaggtacgagcgcttatcgtttccgcaaatgggtaaccagcgaggtgctgccgcagatccgcaagactggccgctacgttcgggaagaactctcccaggctgataaagcccgcatgctggcgcaggagatgaccagcagcatgttgccggcgatcatggatgcattgcaggtcgagcagaagcgctacaccttccctcttaaccgacgctatcaggatcacatccattcacctgatggcctgcgtgaactggcgaaaagctcaatggtgatgaagctgctccgcgaactcgatgctgacgggcatgatgtgtccggcgccgccgcagaggtcacggccatgctcagctacattgttggtatcggcgccgtactgcgcgatatagagacgcatgctcagtacgtgatggctaaggccaagggttactgaggctgctggcgcagggaagcgccttaaaaagcatgatgcgtaacctattcatatctattgatatcgcgtttttattgctctgctcatcttgcaaccaacaatacctgtgggtatatttacctcaacggtactcaaccaaatgttgaatacttggtgtgcaggtcgcgacctggcatagacaggaaacgaaaccccacattatgaagagacagcgcacgtctcatcccgcacgggaggatcttatgtttaactttgacatgcaactcgaccagaactacgcatcgttctacaacccagacagtggaaaggctgttttcgttgatagctttgacaatgttgagttcgatgtgcgtgtagggaccttgcgtgaaagtcatcatgtagctactgtgcatgcagaaacagatgaagagctcaactcaaaactcaaagatcttgctgagcagtacttatgactataacaaagcgggcgattcttgatctggaagctgagataaatgacatccttgaggaagattgtgcagaggttaaatttacctttcatgcagcatacgaaaggcttaatgatcctcgaaacaatcccgcaatatctcttaatgagcttgaggatgtcttcaaggaattcataaaaattcatctcactacgttacttggctacccggaaggaacaactttcacaattaaatgcaataagacaaaactgcattttccttgctcggttgttcatgaccttagatatgggaaaaaatggatagtgcaatcagttgtaaccgtaatgaggaaagctgatttcaaatctaaggatcctattatcctagaaattaattaagcccgccttgcgggctttttgatggatgaaatctgagcacagcgctacaatcataaagccacggttcagtggtctacacatggtaagtgaaaatgaaaaaagcattcgcagtgctgtttgttctgttgtctctgggttcttccgcacaggctttcgctggtaactgccagcatcctgatgacaccgcagctgatggctcacgctgtggcggacgttctgctgactcccgccccggcggtcagtgataattaaggccgcgaaagcggcctgtttgttggagtgacatgtcacactcttttcttgaatgatagccattcgaagaacgaagacattcctccgcaggcaatagcaaaaaccaggccaccaaagaaaagaagcccagcctgccaccactcccatcgccaaacatccatagctcccaccattcccacgatagacccaactagtggtatatagctaatgatgaatgctattggcgcagctattatccagtgcaaccccaaccacgattctagtccagccatgatagccgctaactggaaaagccccaccacgatgtaaacgataaagccaatagcttgcatgtagtcaccatataatttcaacgtttaatatatttatcgcattgttatatgttcattatcccacgatttgcccacaaagaaatcacattcttgtaaaattggtaatcctcttttttttgattcgtagttggatcggataggccgatacttaccattaacttttctctttgtataaaatcatcaatagcattatcaggagtgtcgccttttgtagatcgccacaaggtttcataaaactttgaggcaatatcaaaatcaattaatttagaattatatgcaaggttgaacataattattctgaaagccattaatttgaaattaaattcacctttaacaatatcttctccaccatactgttttgcgaaagctaatgatttcttgaacatttttaacccctgaccataattgtcttgcataatcctgtataaggtcatgcgctcatcattgctggactggtatggctcgagaagaattctcgaaagtacgaaggtttcaaagtgctcttcatttctcattgataacgcaaagtcaactgccgcaagcgatgattggtaaacaccctgatcattcatctcggtaagcagttttaatgtttcttttgaaaaaacagaaacaccagatttctctaaaaaattaccgaacttaccaagaatccccatgatatttccttatttcatctgctcttcaactttgtttagtagtggtgatatcgcccacaggttctgaaatggtagcattttacgggccgcgtgggtttgctggctatcaaattccccgtttaataccccatgcgccaccgttgcagcatcaccaccgagatcgaatgtcggacccagcatagcaccaatggcattgcggctttggaatctggataccggcggcgcaccaaacatcgcgccaagaccaaaccggccgccgctgacgttctcgacggtattcagtggctcagacaaccagccaatcataccgccacggtcaatcccctctttcacaaggttattccagctgtagtcgatatcgcggccgctaagcttttgcttcatcatatagaccatagacccgagtgcgacagtacccagagcgccaagatagaatgatgcatccccctgctgaataccagataccagtacgcgattgtgctgagcaaagataaacgttttgaactgggtgatcagtttccacccctctttactgaagaacagcggcgtatcgcccacgccaggggttacaatcaccgaatcgacatccttcagcaccgcggcttggaatatctccctaacgtgacgatcgtcccacaagtggctgtggccggttagaagtccatccatatcctcgccgtgcttaccgaactgctcaccgatgcgccgcagcatatcctcattgataccaacctgcgccatcttgcgtaattcggttttggctatctcgccgccgctggatatctgccgagccgcatcaagtatcctcgactgcacaatcattcctgaccacgatttaagcacgctgttccactggttcatcaatgtccagttcccaaacttttgcgtcatccagttaagaccgcgctcgaatgcagtgcgccggctatagggatcggtcaggtcggcaatagctttggttcgcgttgaaagaacgtactccaggccaacagacatttcgcgcaggtcttttgtggcgatctttacggcatccatgttccttagcatgctggccataggaccaagagatttgcgtagaccatgctgcatcatcggccgcatcagatcagttgccgcagcgacggtcatgccgccaagcaggcgaaggaagttaacattccttgcaaccctcccagcccgaacgaagaaactgcgaggatcctgcggggcgccgtaggtaccgagaaggcggtcgcgcattgcagttatatccctgatatctgcttcgcgttgtttttcaagcgcagcgcgttgtttaggcgttttcgcctctttgatcagccgcgtatattcttcgctaacctggcgaatctgatcccccatgtctttacggccgaactgcgcagtcagttcgatttccggagccacctgcctgaggtagctttccatgatgtgattgacatctgactccaggaaatcctctatacgttcatcgggaataagcagagttcggcttttggtgaaaccagcccggccaacgagtctctccgggataatatcggcaggaacaagtccggaaggtgcgccgattattttattcacgatctcgtcagcagcgtcctctgcttcctctcgggatagaggttccatctgctttagagcccgctcgcggcttgcattcagccttgtggttgaatttgcccgtttttgcagtcggcgaagctcagaacggtatttccgtgggttatccagcaactccatatggcgctgatagaccggaagctcttctttagcctgagctatatcatcaagccgtgttttaagatcagagctttctttcatcattctggcctgaagtctttctgatgaagtatcagccaattgtttttctattctggtaaggcgcgcctgtgtgtcagcttcctgagatatgagcttattgcgtttatccagctcttccatgagtaggatttttttcccggaccatttctcggcttcggcgatatcactcgccagggcctcagcgcgcggcgctgattcctccgcatttttcagacctgcatttatcttttcaattctctgcccggctttatcagctcctttggcactaataccctgtatccagttggctatcctccccctgaattcagtgcggtctgaaagtatcttatcgaacttataaatacgtggaagatagctttgtgccgtcacaacatcgacatcttccggaaggatcccaagctcctgcatacgggcttttgtgctctcgaaaataggtcgaatactggcggccgcctgcgccacttcaggaatatcactctgatcgccgcggcgcatagccatgcccacagcctcattgaaatctacaaagttcatcctcttcgcaccgctggcgctgacggacttgctgtactgctgataagcgtctcgggtggtttccatctgcttatagagcatggcatcgtattgcttaatctttgtttctgctgccgtaaatgtagctaggccttcgtcatttttggcaaagaaatagttattctcagccagttgctggtttatctgtcgggaaaccagtgatggagactgagccagccggccagcaggcgtgacgctgagtgttttatttgcgagaccaagcccagctagttgctcctgatctagcgtcgtattgaacacctgcgcggcgccaatgctctgcggagagtccatgccccgcaaattttcaccaatggcattagcaacagcggagcgctgagcgggccctgtaagaacctgtgcgccagcgccaagaataccgccaacaagcgcatcaaccgctacgtttgaaatgctctccatcgccgatcttgtttcctgcgtcgcctgcaatgacgcttctgacgcaactccgcctgcggcgttagctaaggcaaagcgcccagctgtttctgctatgctcccgccgcgggccacggctccggcaggaatgaacatcgcagcgacgttaaccggatcaatcattcccattgccagacttgaaatcgttcctgcgcctccgacctcggatagatattccctgtccgccttctgctgatctatgcggtgcttaatagcaagagtttcctctggcgatccggagttgataaatgaatcagcaaagtcctcatagcctttaatatctgcggcatcattatcaaacgggttatagccgtcaactcggtcaaactggctgaacggagcgctggcgataaaactccccagggagttatctatgcggaaagctgcttgcctggattgctgaacgcgctgatcgctggtaaatggatttacggcagagagcaaagaaggcgtttccatataaaaatcgctgtcatcttgcgtggctatctgctgaatgtcctcgccaagcaactctttcggatcctgttcatacgtcggcattatttgccccctgcgtaaatgttgctaggaaggttattggctgagccatagccaaaaggcttagtcagatctggcggcgtatagccttcattgttactgaactgcggtaatggatttccttctcgcttcactctagcctcatcgactcgttgctgctggaactgcatggtttgcctgtacatcggagatgtctgctgatctggtttgaagcgaacgggaagcccattctcaccataatacggacggacatcatcgtaaccgtcctgatttttctgtctcaccatgaccgcatagcttttatctcttggcgtgacaccatcaggaacgataaccaaatcagtatcactacgagcaccaccaaaagctttagctttaagctcgtttttctcctgataccattggccttctatccagttaccggatccactgtttaccccataaagcgcttctggggcatatttcataacctctgcactaccattaatagtagaaactccccatgtggttctgatcatggcgttggtcattttctcagcctggtctgcatcgccaccagtctgtgcaaagtttgcatcgtaaattgtctggtaatcacgttgataggccgcatttgatttgcctggatcggtaatgtctggagaccacgaaccaaatgaggtcaggctgctagcgttgttttgtgcagcagttgtccgtgcggcgacatattttttgtctcgcatggcagtggaaagcatctgtttcatccggtcatcctgctggaatacctggctatatgccatgtccacagccttatcctccggaactccagcgcgggaataatcgtaaaccttcccataaaatgccatagttcccttatcaagggttgccgcggccgccgggttattatcgaataactggccgtagaattttgccataggaacaaccagtgcaggatctcttgaggttgctccgctgttaagcatagttttgacctgcgttggtatcatgccgcttttagttgtgacggtggccagcgcattgatgctctgcggatcagatatcgaaaacgaaggcgcaatatcctgagcaaagtaatggtccacggctgcctggttatttttgtcgttaggatctaaggggaagttattttgcaaggatgaaactaagcggttgcgcccctgttgtgcctgccactctgtatccatttgcttaaatttgctctgcattttctcccatcgttgctggttagctgcaaagccaggagcatttggatcctgtgggcgaagtcgctcaagaatgtcctgtcgtccttcaggggtaaggtccttagctgcaccaattacgccgccatattgtatctgcgcctgcatatcttgccatttcaacgccccaacgcgagggccattagcccggataaaatcagcctcagaaggtaattgagccggtctaagcccctcatcaagagctgaatatgcatccttcactacagagctaagttgttcagcatactgctgacggtactggttattaagctcgttagcctgcctcaatgcctgcatttgcatttgagggctcatagcatcaaaagcggcgtttcccgtatagcgctttggtgaatcaaggttagttaacccgagcgcagccgacacgccagtttcaagctggtcagcactgtatgggacactgccattttcatgcttaacaataccggcacacaaagctgcaagggttttagggttggacacatcaagcgggtcattagctcccacaccaagagcgctgcacagcgccttgatataagcatcggtgttattgccatcgctggccggcgcccaacgattaacgatctcgctcacggtgtcgtatccctggcgctggtacgacagcaggtttttacccagcgcgcggatcccatgctcgggcgtcgcaaaagtagcaaaacggccatcactccccgtctgcccctcccaggggtttgaacctgcttcaatattaccggggttgttattcctcaggcccctggctgcgccagagttaccgtgagccacaacgcggccaacgccatctagatcgcctggctcgccgtttttttgaaggagatctccaaactgctgagcaatattcccagtagtagcctgccaccccatctgctctttgagctgcgttttttgctgcacgcgccattcatcaggcatgccatgaacatcagcatactgatcaatggcatcaaaacgctgtttggcaagactcacgaaggccgggttatcgttataaagaccagtggactgagttacggccagagagttcccagaagtaaacgcctgatcctgaaactgctggaactggccaacctcataccggcgggcctggttgtgaaatgactgcatcgactgctgcaattgaaaagataactgctgacgggcctcaccatccggcactgtacccagcaagtcctgagctttctgctgcatgttctgcatgacgacatcgctttgcccgagcgcagcctttccctgcttcgttatcagaccattgtcaggattgttgaactggtcatcaccgaactgattaaactgcagcagagcatcctggctaagcgcgacatcagccttgcgctttgcatcagccatcatattgatcgacgtatcagcagcctgctggattccctgcaccagcggattttccgggacacggagattactcgtcatcaccggcgcggtttgcgtctggctctggcgttgatattgcggaacggttggcatagtcagctccttttacttagcggaaagcggcttccaggtaccgcccagcgtcttgtatgcattaagaccggtcagcgtggagttgagcagtgttgaacctgcgccaagcattccggactgcttatcaattttcccctgagcgcggctggtatcagcctggaactgcaacccggctgcctgtcgctggccgttgttgatggtggtcagcgcgtcgagcgtgccctgctgcatggtttcagttgtcaggtccaatgcgttaccgctcgtcaggtcggcgccgttagcagccagtgcattggtttgctgtccggcaacccgccgggcctgctgccgctgctggtatgcctggtcattagctgtattgatagtgtcgcgggcggcctgctcctgagcgtcggcgttagcgttcgccagcgcggcgttagcgcggcctgtctggatctggctgtaagcgctgagaccgccagagacggcggaaactgccagcgctgcggtaccgacatcacacatggtcgatctccttcgtaaagtggtgaaatggcatgccttttaatccgtatggctcagggtcagcaagagtgaaccccatccagtgaagccaggattttgctgcgtggttacgcgcatctacgtaattttcaagcacgcgatatccgcgtgacatgtcacgaagaaccgggcggcaatggcggaggaatgtcagcggctgatgctcaatatggtcggtgctaaccagccacggaataccgcgcccggtgacgatcgataccggagatataccgaagatggttaccacctggccgttaatcatccctgcagcggctaccgaagcgcttttcatggcgcgattgatgacttcctccggagtcatcccggcggcagccataaactcatcgtggtctgcctggcggacatgcgggagaatggcgctgatatgctcgtcagtaacgctgactatctcaacttttcgcatatcagcctcctaccgttacgcgcggtataatggccagaatgccaagcggcagcggatcggaatggctaattacaacccgcccgttacgctcccagtttgcatcgaggttcatatcgatgatgcccgtctttagccctaccgggtcgtcgtagaattcccactcacgctgggtatactccagcaagtgagcatcatctgttccggcccaaaccgagcgcccgctgttgagcattacgcaaagctgattgatgagtttggtcttatccagcagcgtagactgccctgcaacgttcacgtccagagtttcgataaccgcggctaccggcaaaccgatatgcactacagaagcgtgattttcgatagtcacctcaccgccagaaactatctgctgaggctcaacattcccgtcggccagaatgctgaccgtctgcccttccaggtgggataatccggcaaatgtctggcgggcgattgaccaggttgattgcgcgctattgcgcagtgctgccggtacatcacggtttaccagcacggtagcgacggttgaagaaacgacttcagcaatgcttatgcgcatcgacttactgattccgtcctctgtatacggaatgtgaatttcctggctggtactggaggaatcgaagattgcagagctgcacgttagcgtgaattcatcctggtatgtccagccaccggtggaaccgatcgtcattgtgcgtgaagagtcggtgttttctccactgtaagacaggccagaatccacgaaaaatgcatcctgctgttctgtaaactgcctggtgttcagtcgttcaacataacgaactgtcgatccattcaccatgcggcgaataagtgcatagacagcatcttcctgcccttcgctaatactgcagatcgattcgacatagccattagtcattgggtgaggatgccaggcatatacctgctgctcacggagataagtcaggccaagcagcatgccgtcactcctcgcacaccatgcaacgctgaacggctgtactgacaatgcccagtcccggatgctgtatccgttaaataggtgatttgccagcagcgttaggtcacttgattgatagctgtcctgatcgaatgagtagaacaaatccctgatgatggagcctttctgctggacgtacagcgccacgctgccgacatttatcggagccagatcgctgctgccgttgaatgactgaccggacatcgcaaagccacccgtacctgtcaggttgccgttactgtcgcccgtcaccttaaattcaccgccgctggtcaacacgataagctggcctacatcgagaagatgcaggattttgttcagctggcgaccggcgtagttataggttatcgcatcgtcgtcaaccttcgggttgctgcgatagaagttgtgataatcaccggtacggctacaccatatagtttgaggaaatgcccggctgccgccgaaaatcagcctctgctggtaataggtaactgtacccgggtagccgtctgtatcgttccaggcataatgcgcccatttgtaagtggcgaaggtgctacctaccacttgcgctggcagctcgatctcaccatcctgacgtggcacaacgtcggccgttgcagttagtccatctccggcgacggctgtaatacggcacacgccaaaaccactatgcagatagcgccatagcacaccgttacggccaccaagaccccagccatcccaggaatctcccgttgtatgggtcggagcaacagtgccggttgtgccattagaaccgccgtcaacacagcgataaaagttctcctgatatcggcactcgtcaccgatcccgatgtctttatcggtttcccaccgaccaacactatctaccgctttctgttccatgtagaacagttttcccacgtgctggcttttgaaaatcgggctgctggcagtcaacgttacggatccagttcggcctgaggcgtacacagttaccgagtcgtctgtgttcaggtcctggaatggcccgctggttgttgtcactgcggcggtgcgccagtcagcctctccgtaacggcggatctcaagcggcggataatcgttgtggcacaccgtcatcacatcggcagactgcgtaaatttcagctcagagatcacgctaaccggccatggggtagcaacttcaacagggctgccgccgtccgtaaccagcgcgccgttagaccagacacggaaatagtgatcaccgagctcgagcgcataggtttgcgatacactgaactggaacggtattagccggcagtaacggtctgcatatttcgcgctccccaggaaccggaaaccgggacgattttcaatgccgcctgactgccggacgatgaaattgcggcagcggcgcaatgacgtctggtatttttcaagatcgattcgaccatacagtgaaggcgatatctcgccgccggcaagcgacggctgcaccagtgaataagccatcagcagatcctcgcactggcaaggtctgacatcgcctgctgcggttcatgtgcctcatcaagagagcgttgcatggccgccgtaagcacctgctgataattggccattgcctgctgaccgagactggcatttgccgcgatcggcatggctatctctgccgccatacgccacgaaagagcatcagcgaacagggcatcaaacatcgtcgggtcagtgatgcttttcacgtatagcagtaccgcctgagactcattggtatgaatgacgcggccagtgccatcttcattgctgccaacttcaaaaacaggcttatcctgcagaacgatatgagacccagtgaaccacttcggtaatatggcagctatgcgcgcgcagtcggtagggtactgataccggaacaaccatcccggcgcagggtcgccaaggtcagccaggacaacgcgcgacatggcaaagttccagtcgttgtctgccagaactgcgtcgcgcatggactcgtaaaacaggttgcaggtatatgcctctttggtcttttcggtgaggctgttaatcgtccggctgttgcctatacgtgccagcgcgatattgcagatattgatcactgatgccatatcatccaccaactaaaaaggggctttcgcccctttggttatgagggcttacaccccgagttcttttcgcctttcggcgatcttcgccttcagagtttccgctttggtattgaaatgcggcgcttcgccgaacatttcttcatactgtttgcgcaaatcgtcgagctcggttaactcttctgcactggccgggacaatcttttcgctcaggctggcatcaacggaaaccagattacttcccggctcaccgtcgtaggtaacgatgtcgcccggctcatgcaggcgaccattgatgaatgaccgcttagcgactttgtactcaggcattggtttgcacgcctccggtgatacccgcagtgactttgccagtggtcggcgcagtaccagtcaccgtatagttcagacggatgtagcgttccatcttcatcggcaacgtgataaccggcgacttatagcccagcaccagagacgccagagggatggtcatggacagcacgtccgcagcggaactgaatgcagagttgtcatcggtttgcaccgtcacagtcaggctggtcaggttgttgaaaccttcaacaacctgaatcagcagcgggatatcgccatatttaccgacgtctttattgctgccggtatcaatgacgttggtcgaagcagccgtggccgtaatggcctgagctgcggaaaaaagcgcttgctggtcgagcagcatgatccccccttacgccgttacggctgattcagtattcaggatggcgtcagcgcgacggatcggaatacccaggaaagaaacgattttcttaccggcatattcgtcgatcgtcaggttaacgtttttcgcattcatagcctgcttgtgcagccaggcatggatggtcttgttgcagtagatgacctctttgccatcgcccagcattgccacatcacgcgcgtagtacgcatcgaccatcatgctgatgaggtcggcgccggttgcagcatctttggtcaaggtggtgacatcgatgttgcagatgcgcgagatcgaacgccagtcacggactgacaggccgagatgccatttgaactcatcacggtaagccaggaactgaccgccgttcgcatcgctgaccaggtcattacccagatcctgatgctggaacccggcgaccataccttccggatagatcatgtgcgcagtgttctcaccccaggacatgaaccagatggaggtattggtagaaccactaccaccggcgctgaatacgttctccgcgctggccgctttggaggtgctaagagtgttgaagcgcggagccaggcccatgaacgcttccggctcagcatcggtattgccgtagaaggtgtagcgggaaaccttgttgttgaagccctgcagcttgcccatgttctcggacacgcggaacgagtccgcattaccggagcgatcggccaggtctttgtccacaaagccaaggtcgtacagcataccggtagtgtcagtcaccggaacggtctgggttttggtaggctgcacgccctggttgtaacggcgccacaccggctcgggaataccggcacgaatggtggttttgtgcttggaaccgtcattacacggcacgtaaatcgcatcggtaatgacatcgttgcttttcgccagttgctcgacgattttagcgatccgcccgttcttgtcggtacggctgtacacgtcaagaagagaaggcagcgtctgaccaattaaagccatgattacacctcactattttttgcttggataaaacgcttcgaccagatcgtttttcggcgatccgttaccctggccagtgacgaaactgtcttcactcatcaacttgcctacctttgcgaacgcccgaaccatttccgggtggttacccaggccggtagagtcaaggaattcgcggaactctttcgatgcgaaggtatccagcgccttctgcgcgtgtccgacggataccgttaatttgtcgccaccgatttctttgtcagccttcgtgtcagctgcccactgttcaacctgctgcccccaagactcagcctggcggttctgtatttgctcctgcagttgcggccacagtccagccagcttctgcgcctggtcattagaaagaccaagctcgcgcgccaccggctcgaaaagctctacggctttcgaatccagctccgcaccttccggggctgtaaactcatatttctcaggggctttgaggtccggcgttttatttttatcgccctgctccccttcgcctttgttatcttcttgctgctgctgctgctgctgctgctgctggcctttgtcaccctctgcctgactgccatcagtagacccttcctgagaagttgtagcggcagtagttgcagtggttgtgccagcggcaccaccgccaccttcaccaccctctcccgcggcattcatcagacgccgatacatcagacgctcaaataaattcatcgctattcctcgctggcctctttggccattgccagatactgatcgggacacgcctccatcacgtcggaaaagactttcagtcccgtgttacgttttccttcggcgaaggctgccgagagcgcctcaccggtataagtcgtacgccacaccccagcctgctcaatcaggcgccagatgaaacggcggccgtgttctgtctcgcagatgagacgcaggtcattaagttcgttctcgcgccgtaactgctgccttttgagctcatctgctgccagttcttcacgctcttcttcgctcaggtaatcagtcattgcgtcaccgccggctgctgagcagcatcagagagtgtttttaacaggctagggtcagcggtgttggtatcgctcagggtcttagcagttgcaccagcttgctgggccatagccatcatctgctgctgttgttccatttgagcgcgctgctcgcgcgtagcttgcacctcatcatcagagttaacgatcgtggccgggacgccgagcatatttccgtactcgtcaatcgtctggtcgatattgagtttgtcgagcgccgcaggattggcttttgcaagattcccaacaaagccaacaaagcgctcaacgctgctgatccctatagatttctgggcctgtgccaaaatggatacatattcaactttcagaggagtgccctgcagttcttccggtggctcaggaaagaggttgcggcgcgccatgatgttgaatgtgcgatcaacgaaaggatcaaggaattcatcattaagtcgctccagtactggaccaagctgcaggagtttctcatcctgcattgcggccacagcctccactggcatgctcctggtgttgatggtgctgaacaggttaaacaggtcagagaagaagcaggcttcaatcatttggcggtcatcagcaatgctgccgagcatgtcattaagctgagggctgacggcgtaagccggacgcactagcttggtagcatcaacctcatcaacataagtgacgccgccaggggcaaggttgatcagcttatttttaagacctgtcggggccaccattggcgggttaacaagcttatcgatcgcgttagctttgcgaatttgctccagctgcagcgccttaccagtaccgagcgccatcattcccgggcagttactcccgtaaacgtcttccccgttaatctcccagcgcggtgaaaggatcggcggctcatcaaaaccagcctcacgaaggagcttgtcaccgtctccggacaactcgaaatacaccgatttgaatgccttgttgcgggagttcagcttgccattcacacgatcgatattgggctctgtcagatggaccacatcgaaccatgcttcatagttcgcgttatcccaggcgccgcgcacggcgttactgacgttgtccaggccaaactgcataacaatctggcgggcagtcatggagaaaacgcgatacgtggtatcgactgacaaacgatgcgagtttgacaggtagtaacttccgatcggcagaggatgagtacgaatcacatcttcgtcgtcttcgagaaccgccatagccgcggtaccaaaaacaccaaggtgccggtagataatcggcagggactggtagacgttagagcggttcatgacgtcgttcatcctggtcatgaccacatcaagccagcgttttaccggtccatattgcatcatctccggatccggcgttgccagcttaaaccatgggcgggttgggctggtgatacctgacagcatgcctgattgcagagtgcgggcagctttagaggcggtagggtcaacgatgcgggtattacgcttgctgccgttgtttctctccgtcgtaagaaagcgcgtactgcgcggatcgataaattccgccagttcgcgccagtgctcctcaaagctggtgcgctcatttttgagctgccccaggtgtttgaggtaatgctgtttcggagagagttcggccatggattacgccccgagcagggtcttaccctgagtgccgccagaaggctgcgttacaccctggctcgacgtcaggattgttgatttctgcccgcccgctgcggcacggcgacgacgatcgctatcagcggcgttctgtacagcagaatcggaaacctgcggcgccgcctgaacctgcggagaactcactttcggcttgctgatgcacattttgctgcgctccatacgcgtttaaattattaccaatttaaccacatatgatttatttgtcgtagtgtattgaccttttgccgataaattattacctttttggtaaacacaacatgaaagcgcaccccattccattccattggtggctttgtcgttactcagatggcggagtgcgcttccaggtgtgaaagcatccggcgtatggcacatgcgtcgatagcggtccgggggctccttggtacatggcccagcgggtagccggaatgtgcaagccatgccctgcatgcacgacagcgactcaccatcgtggcggtacggtgtgacacctcggaagagacgagggcacaacaggtaagagcattgagattgatcgtcgttcctgggcccaaggtctgttcgaagtcagtgctctttccgttgtggcattagctcagtcggatagagcaactgccttctaagcggttggtcgcaggttcgaaacctgcatgctgcaccagaatcacgcatcaggaccgtgatacccgtagttccagtgcaagtttggcggtggcagttattccctttctgaccaccgccctttttacagcaggacgccattgcgatgacttcatgctgtaaaccctgtgacacccagccaaggacggcactttccatcatccctgtttcgcccggttcgtccgggcatttttttaaggtgagataagactatgagtgacaaagacattgaatctgaaattcaggctaaaggcttaacggcgccgcgcgttacgccagaccatatcgaaagcattattgctcaggaggcatatttcacagcagaagatggtgcctttggcgtagccataaaagcgaaacatactggcggagaggtaaactaccagccgcacgaatcactttctctgctgacgttctgcgtcctggtgctgcgcaacggcttcaccgtcaccggtgaaagcgcctgcgccagtcctgaaaacttcgaccctgaaatcgggcgcaagattgcccgcgagaatgcggtaaataaaatctggatgctggaaggttatctgctgaagcagagactgagcgaaaaataacaccgtgacatgtcacaatagcccgccgatgcgcgggcttttttttacgcccacgggtcgtactcgctgatcacgttgggctgcttgccgccggcagcagggaaatctgaacgcttcgtcaccgggtatgcgaatgtcagaagcagcgcatcgcccttgcccggagaccggccaagacgctctttgatatcttccttcggctccatgacgatcttaccgtctaccctcaccttgtactctgccgcggacaggtcgtccgccgtctcctggtcgtccagcgcgccgccgagcttgagccacgtcttacaggcgttgaacatctcgccgcgcttattcagcatctgaggatctgccgatgcgccgccgaacggcacaagctgccaggtgcggccccatccgtcaccgatggacttcagaccggtaccgtagccgaagtcgataaacaccgcgtcagcctggtactggtcctcaaagtcggcgatacgcttcgccataatcagatcgtcggtggtcttgttgccggtccagagcactttgctgtgcagcccctggcggagataaatcactgcgtcatccacgccggaatatgccgggtcgacgccgattatccgtggggcgtgcgacacctgcgcagcggtaaccacgcgcttcatcgcctcatcggtcagcccggtagggatgaactgcagctctgacgcatcagggaagatcccgcgcacacggaccttcacaaagtcgctgtcctcgccgtagtcatctacccatttctgcaactgctgcttgttggtgccttcgacggtgcggctgtcgatctgcgcgcacttccagcgatgcttgtatttgcggaagcactcgcggaatcgcccggtgttacgcgtcgggttaccgaatgccacccagataatttccgtgtcctcgtccgtcagcgcgccctcggcaacctcccagaccagatcagcgatgttggatgcttcgtcgaacaccacaacgatgcgcttacgctcgttgtgcagcccagcgaacgcctctgtattgtgctcagaccatgggattgcgtcagcgcgccagcgtttatcgtggcccggatcgttgctgtacatcgccgtagcggtgcaggtgaaccattctttcgtgatagccaggttcgaccatttgatgatttccggccaggtcttcgtgcgcagctggttgtcggtgttagcggtcaccaccaccttgcaatcttcacaggtggacatggcccagttaatcagcatcgagatgaacgcagatttgccgatgccgtgtccggatgcgcgggaaatcattagcggctggtgacgtgtcgcgggattctgcaggtgctcgcctatctcgcggaatgcgtcagcctgccactggcgcggcccggtggcgtgtgccagctctgtaccctcttcaccccacggaaacgcatacagcgcgtagcccagcgggtcatgggtgaagctggcgatatcgtcgatcagctgttcttccggggataaagcggcgtctgtcactgatcaccaccctggcgctctttcaggcggcgccgggctgcagccatgcggtcggcaatggtgacgctcacgttaacttccatgcgctctttgaacgcgttaacgtcgacgtgcttaccgatgagctcgaggtttttcaccttgtcgggccatttcaccttcttcaggatatgctcgacatcctcaacagagagatccgcctcgccattctctttttgcagagaagcctgggtcgtcttgatggtagcgatatccatagcactgagagaggtacgccagaccttcggccattcagcgatcggcttcatcccgccgtcatcgttcaggatatccagcacatccatctggtcgatttccaccaggcgcagcaggacataatcagcgctgacgcgcaggcgcttgttgcgctcctccatgagctcagcaattcgtttatggatacgctcatcacgcatcattgtgctggctttgacgtgggcagactttggggagaacccggcattgatggccgcctgcgtctgattttcagggcatttcacatactcctgggcgtaggcttcctgcatcaccgtcaacggtttgtactgagttgatttgcgcttcggatcctttggcatggtaaacaccccgaaaataattaccttttaggtaataataccatgccaccagcgatgttacatgatcggaatatcatcatcactcacccacccggcccggtttatcaggtaggtaacgacaccccgcacttcaacatcgtccagggcgtccccttccagcgcctcaccatcatcagtgatcagcgcctgcccgcggacaacagcgaattcagttttcccggcatatgcgataaggacatgatcaccctgctttggccggcggcagacatcgacgatggcataaccggcggcagtctccagggcgcgacagttggcgtcatactgacaaaggcgggaaacggttagcgtttgctcaacgtagtctgcggcaggtgatggaaaccccatgatgacctcacataaaaatgtcgcggtagggatacccgttaccggataccccccgcacagatcccggcgtgcgcgatttacgcaccgggctcctgcctcgggtgtctggcggtgaaccgctccacaggccatggatgaagaacccgaacccttggtagccatgcggctgccagtttgtttgctttcgtccaggtcgtatcatccttctggctcctgcgcctgagcgcccggcgccagaggtttgttacgtgtgtcctgaacttctgcatggtggggaagttgcccggtaccgagtgatagttcaggtatccctgaaccactctcctgagccattttccctgttcggggattgagtaatgccagcgccttcgcagaccgtctttgatggctttcagagttgccgtcatccgatcccggcgggtctttcgtatcagcatgaacctgccgttgcgatctttcccgctgatgtgcgtgaacccgaggaagttgaacgtttctggtttgccttttcccctgatggcacggttttcggcagcgaagcggccgaactccatcagacgggttttctccgggtgaaccgtgagtccgaactccctcagtctgcgctgcatggctatacggaagcgccgggcatcgtatcgtttgtcgaacccgatgacgatgtcatcggcgtatctgaccattaccacattgcctgtggcatagcgacgtcgccactgatgcgcccacagatcgaagacgtagtggaggtatatgtttgccagcagcggtgagatgaccgcaccctgtggggtgccttcctccgttgctcgccattgaccctcctccgacgtcccggctgtgagccacttacgtatgagcctgattaccctccggtcgccgatccgatgctctgtgaacctgatcagccattcgtggctcaccctgtcgaagaactgactgatgtcggcatccagtacccagtttacgttagtgcgtaccagccctgtggccagtgcgtccagtgcatcgtgctggcttcgcccgggtctgaacccgtatgagaaccccataaagtcgttttcatagactgcgttcaggattttcaccagcgcatactggacgatcttgtcctccagcgaggcgatgccgagcgggcgttgttttccatccgcttttgggatgtagtgacgcctgccgggctgcgccctgtagctgccctgatgtagcctccggtgcagatctgttatgttgttcttcatgtttccggcgtagtccatccacctgatgccatccactccggcggccgctttcctgctcagggagaggaatgcggcttccagtgcttcgactgtcagcaggtggaacaatgctgtaaaccgttctttcttccgctgcttcgcagcttcccgcacgcgtgacagcctctgtgacatgctttcccggctctgtgtccggcgcatgtgtggctgttccgcgttccccttggccccgctccttcgctccactgactccgctcctttcgggttgttcgcctgcttcgccgctactatgagcgagtccgacttctcctctccgtacatcaccggctatgactcctcgtcttcccggtgcgggccatctccgacactggcagatggtcagaggggagatctcccggttcccgcgtagagatcgtattgacatgccagggtctcagaccccgccgggtccatgtggcactcgcagtatcgcaccctatgatgttgccttccgttaacagtacaacgtcggcacccggtaatttaatatacatttcgtggctcaatggctggcctgtcaacacccctgtcaacgcttcgccccatacctcgcggtatgcaacgcatgactcggggaccttgtggattgctggtccttcaatggtcggggactttcaccccttgatctctaaccggtctcccggcgcacactgtatatttaaacagtataatcatgcgaggatttagtcaatatgacgtgacatgtcacagaggtagttttgtttcgtgccagccaagagtggcccagcattgagagtcaccagcgcaagggcaggatgccaccggcagttgatcgccgcacttgccgcagcgccgtttgctgatggcgttaatccggccgcgcacgcgggcatcatcctggcggatcagcagcgcgatgtactcggccatttcgtagggatcgcgaccagggcgccgggcggcgcagttacgggccagcatatcctgctcctgttcatccagcaccagttcaattttgcgctcaccggcggcggactgccgcgcgcgctgcgcggctttgcgttctgcgggggatttaggcatgctcccgctccttctggtgttggtcttcattgctgaagtcgtcgccgtcgatgggcatcaggtttttagccagcgccaagccattcaatccaggtttggcgcgccaaagcgtccctgaaagctcagacagagcttccacctcccaataaattccaggattaaggtcgtaatttatttttccaacacaagtcaccaactcaacgaccttccccacgttttcagggaatctggaccgaataattatcgccaacccacctgcgcgtaactcagccatggttcacctcctgcggggcggctggcagcggcatccagtgggttacattttgcaaattcaatctgtcgcatggctcatagccatcaatggtaaatccatcatcagagctatacatggcctcgccataaacctgatctccatcgaaagcgattactgcctcaaactctatcggcatccgctcgcttaccggaatccatttacccggcacggtaacgacgctctgcaccgagttcagagcgggggtatcatgctgggcggctgctaatgtggagtcaatgatatgctgacgcatccagttagctcctcgtgcaaacacgtctacagggtctccatagtaatatcctatttcatatgcctgccctgatgtcatctcatcaggaattaccagcactaccggcgctggctgctctttgatgtgcaggcgcggctctccgtctttcggctccggccatttacgctgtttattgactgccagcttttcaatcattgcctgcgtaatctgctcatcagtgatgcctgcacgacgctgcgcatcccacagcagaaactgcatatcagcccactccgacaggtcgccaggctcggcagcggcttccagtgcttctttgctgaggtgcttcagcgggccaaccggtccgacattgccaaaggtagcctgtgaccactcggcatgcgcactgcgtacctggtcacgttccgacgctggctgcgcgtggcgatagagcggctgcacgtctttaaactcagacatccagtactgacctatcttctgacttgtagttatcgctggtatacctatgttgttattgttgtgcatccacgccaccggctcgctgtccgctgccggctgcgctggcggcatatctggacctttgcgaatggcttttgccagctcgatagggtcatcgtaaagccagtctccggtctcagggtggttggcctctgccagtcgagcggcccactccagaccgtctttgtgtccctgtaggtaatcaagcggcagttcaaccgactcgctgctgtccattgcggccagcgccatacgggcaagttccttagattcttcaagcgtggcaattcgaaggttaaagccgctttgtcctgatgctaattcttccaggcgttctctggttatggttgatttggtcatggttgactccagttatcctcgatcgccacacctaaacggtgcagccagtcggcaagcttgagcatcgactcacggtcgctaagtccttccggaaagtcttttagttcgatagtcggtatgaaacgaccgaaactatcgcgctctattgtcaaatgctgctccagaacagtctgatgaatgcggctgttatgccgcaccaggtaaacggatttggagtctttagctttagggtcgtagcgatactcggtcagtatcatctggcttctggtgcgatcggttcctctccacatcactcagcctccaccttgatgccagcgagccaatttctaaccagctgatattcgttatttcggaaagagccgcaggcgtaaatgtacggcaaccgcaggttatggccgttctggcgcagatagtctttgcatccatgctcggtaaagcaggcagtaacaaactcatcgacttcctgcatggcgtatcgatcatatccgcgagtgtcgcgaccatcctgataaagcgcttccagccgcttggctctcagctcgctgacctcttcaccatcccatacccagcaaatccgactaggcgagtgctcatcgcttccgataatttcacgcttctggaaaacgacgaacatgggctgatcggtaatgcggttgtcctgcgtcctgataagctcaccgattgtgtaaagctcagggggcagcttcacggtgcgggactccagctcggcgatgcgctgacggtaatcagccaccattcgacgaactccttcaagcggcgtgacatcaccgccgtctggagggtccatgtactcagcgcctggaggcaggagcctgcaaagttcttcgtctacctgctgcgccttctccagcgcctctaccagctcagcgccagccgctttccatgcggcccataaactggtgtaagtgtgatcagagtagaatccggtatagatgcggagttttttgagataaccccacggcagagcgttgcattcttcagcccacgcttcgaatttctctctctgcgccagttcggtgatatcagttgtcatgctcgccatccttcgcagctataattgctgcatccatcaaagtcgtatgggttgtattgccaggtaatgcggccacaatgtgggcagttccagcgaacctttccactttttgccttctgtctgcgattgtatttttttagccattcaggcatcaccagcccggcaccttgaaccatagttcggcggttgaaattattgatattgaacgtgcgccgctttactgcatctgccaaatggaatggcagccacacaacgcctggctcatccgtgttggcggatacaaaaacgaatgccttgctgaaatcatcggttggcaaccctccgctttgtaaccagtaaacatcgttcccgttccagtcaccttttttatacgcaacgtatgcgctgcaaccttgctcaaccacgctatcgcatgggatgtactggcaatccacatgccatacagccagggcatcaacagcatcagcgcaaatcggctggtcaatctctctcccgtagtcccagcatctctgcgcctcttcctgcgtataaacgtgcgcgcggtcgatattggagctgtatccgtttccgttatggcaatgaaacgaggcgttgctccccacagtttctcgcgtgcaaagcatgtaaaaacggttgctcatttgtcggccccctcgcgatgcctggaaatataatccgcaagttcgccttttttatttatgttttgcatctcaatcaggtctgacatttcaagtccattagtcggcgagataacaacaaagttaccgttcacttcaaactggcgaccttgcttctccatgcgcttcacaaaatcagcgacctttgacattcaacacctccgaaacgaatgacttagcccacgttgcttctagatggcattccattgacaaaagatgcgcagcaaactcttccaccccatcagccttaatcccggcatagatgcgatcggtggcgggggtttgaactgccgtcacattagcccggtggtcattccatccgcgcgcatatatcggatttatggacatgccgtccttcacgcagtacatctgaccgccgcgattgataacttcaatttcttctgcaacgccagccttcagcgccacattctccgcagccagctgcttaaacgctttcgccagtttcaggaacttctgctctctgatcgacagctcgcctgcgctctccagggaggcgatgagctcgtttactgtttcgatgttcatgctgtcacccactcgatcgccagataagccacatacaggacggcgatgattgccacccacccaatgatgtttgccaccatcacgaacagcagcagtgaccgccggctgtaattcacgaaatcaaaatccatacttacccccgcttacccgtttaacttattgattcaattgataacaatgaagatcgttgttttagaactcttcgaccttccacccgccaccggcttttgccgggagcttcgttactccgatgatccggaatgggtactggtcggcggcgactttggttttcaccctggcatcgtcggtccagtaaccccccttcacttcgtgcatttccagttggccgttcgccagcatcacggcgaaatccggcgtgtagaacgtgttatcagccagcctcagcttgattccttcaaaccggtaccaggcgatttccccgtagcgcttgcgcagttcaagctcttgcgcatacgccgtttcggttttgttcatctggcccgctttaagccggccaagtgcctgtagtgtctttcgcatgatttttaccttattggtaatttataaccataaacggatcaatatcaatagtcttgcgcatattttattacccttttggtaaacattaaggcgtaaaaaaacgcgcttccgcgccggtattacttgatgagtcctgctgccttccctcgccggtattcctccatcagccactgtgccggggttatacctccgagtgtcgccgcgttaggcatgcatccgaagcttcgacctggtggatggtaggtattgccaccggggtctggaggggtgcttataggctctggcttcgactggatgctcagaatcggatcaggtatctgatgacctgccgcgacctttgatgcccattcgtcaagaagcttacgcgcatgtttctcaacctcaatctcacttaactgacgctggtacatcgcgcgcctggtatcgcacacaatccagtacatgacagggtggcgccacgggaattgttctggtccgccaggctgtaggcttttctccttggcgtagcggtgaaactcccccatcacatcttcgatgctcacgccaagcaccatcttgctgtctttgcaccacttaatgaattgacctggtgacggccagaacggtgattcactggcacgggcatggcgcattcctgctgatacctgctcgcgggtacggataccaccttcggcgaaagcggcgatccactggcgcttagcgtcggtctcctgctgtgcggtcttaaggttggtctgctctgctgccggaaacagttgcttgagctgtttaaacagggcatcgacaagtctctctgcgctgatgttcacaacattgtcttgctgagcctggtgattgtccggacccatcatgcgagccagggcgccggcatcacgattctgaattgctgcgaatacgttactcataagaaatccttccagccttcagggctattccagtgtggtacttcatcgtcagagctttcaccgcgctttcctgccgctctttttttcctgttcatcagcagccgggcaaacttctgctcccactgcacgtgttgcatcacattgccttctgccatccagtatgtgatgaattcgatcaggtctgatttcttgtaaccgtcagctggtagcgcatggccccatgttctggcgcgcatgacaaagtcctctgacggcttccagttttcatgcatggtgaatttgccaattggctctccgataccatcaacgacaaccgtagggacttgaattacttcgcgcgcagagagaggggtttttatttccctgatccctgatccctgatccattcctaatggtatttgtaccgtatcagtaccgtactcatacggtactaggggtaaacctttgattttgctttcttttggcttattcactacctgatgtttaaggaaattcgttatgaccccaaaatgcttgccatcaggggtggaaaacatggataaataaccacagttggaaagctcccgtattagtaccggaataggaacggatggttctcggatagggaaaactgcagctttgataagcttcgggtttgcattgaaatagccttcatcatctgcgtaattaagcagaccaatagccagcaagcaggctggttctgatacctctgccatgtcttcatcggtccagaactcgggcttaatggtgcgaatgcgggccatcagatcacctccacggcattaccttttgaggcctcatgcattagccgttttatctcagcatggcggcggcggttagtctcgagggtgcattcgacacaatgcccgttgtatacccatcgctcactgtcatggccgtgcttacattgcttaccggtgtagtagcgctttagtcctgcctttgccgcttcgacgcgagtaatgatctccatagttcctgtctcactctggttgtggttacggtaattttgcagcaagccaaaaaaagatcaaccgtatttggataattattaccaaattggtgtacagggagaggcaggagccgcctgggggtggcggcgcgggtgagttttgaggattaacgttcgtggaaccagaggaccaggtcggattttgcggagatccacttacgggatttgcaggctttaaacagtctttctaacagaggtttacgtggaattcttctacggccagtcaggtgaacctgaatgtagtggctggtcgtgccggcgtcacttgcgaactcttcgcgctctgacggagagaggtcgagccagcagcgtttgaagtcaaatttttgcacatcgctcatatttttttagtcccggactaactttagacagcctgattattaccaatctggtgtaaaaatcaatgactgttacctttttggtaagtttacctttatggtaatattctattaaatttaatcagttaggtaacaatttcaggctaaaaaaatagaaatgaaaagcatctacgacatacgacgcgacaacctcaacgagataatccggaaggatttcgataacacgcagctccggtttgccgagagaatcaaaaaatcagctaacctcgttaacaggtggagcaaggggacaaaaaatatcggcgccaacgcggcacgcgagatcgagtcgttcgccgggaaaggtcggttctggctggatatcgaccatctgtcagataccccgacgctgccggagattatcgacccgcaggaatggagtgtggaaaaacaggcagcgtttaccctgggtgtatggatgggacagcatccggatctgaactcagagaaaaaggtttcggaagcggccggtatcggccaggcgaccgtaaatcgcatcctgaactgcgaaggctccaccagcattggcgtgctgtcggctatcgccagggcgttcggccgcgatgcatatgagctcatcctgccgcctggaaatgctggtctgattgactatgaccaccatgaatacgccgggctgccgcaggaagagaaaaacaagatcgccgccttcatcaagttcatcgtcagccagaaccagtaacctctaacctacctgtcactccctgatgggataactccccgcgtctcatgcacttaccaaaatggtaaacttttcctcatcaaatctattgacacaaccataaattgatcagattattaccttaacggtaacaacagggcgttgaattaccagaaatccaccaccgggtggttttctcatacccctgatatttaccaaatggtaatagtgaggtgtgtatgcaatggcaaatcattaacggctggtactgcgttacggcatgcgggctgatgagctggaagtttcgcacgctgccggaagcaatcaactgggcgttcgtcagcaaactggcagcaaaaacggaaatgggtatgggggtgagtaagtgaacattcagcagattaacaacctgaaaaaaatcatgaacaacatcgacggcgactaccagcttaaccagatgctgtacgagcgccacgtcgagcttatcgacgcgatcaagttccatcagttgcaaaagccattctacgaactggagcgcaaaggcgtgcgcagcgagatcctggaagagctgatgatgagctctgagtttgaagaatgcctggccgcgtatcagcgggaactcaccggcatcattgccaagtgggatctggctgaccaactggatacggcgaggaacgcagcatgatgaataacgttggaagcatggacagaaccaagtatctcggcggcagtgatgtcgccggtattctcggaattagcccgtggcgcactccgcttgaggtttacctcgacaaagttcagccacgcaacaagccaatagatccagggaaacagagagtgtttacgcgtggccagcgtatggagccatacgtaatcgacctgctggctgaagaaacaggactcgaaatcatccaccgcgggaaccggtacatccatcgtgattacggctttatcgcagctgagattgatgcagaagcagctaccggagagaacatcgagatcaaaacggttagcccgttcaaggctaaggaatggggagaggttcagacagatgcgatccctgtgcattacacggcgcaggccatgcatgggctgatggttaccgggaaacaggtatgcgtatttggtgtgctgatcggcggtgatgacttccgtatctatcgggttgagcgtgacgaagaaaccatccaggccatcctggagaaagaagtctccttctgggacagggtgataaacctcaacccgccggaggccaccagcgtaagcgatatttcgctgatgtttgagaaggacgccggtaccagtattgaggcagacggtaaagctctgtcgctatacaacgaccttagagacatgaagtcacgctgcaaagcgctggaagcagaaatagctgtatcagaagagaaactgaagatttatatgcaggataactcaattctgacgctggatggtaagccgatctgcacatggaaatctcaggttagcaatagatttgaccaaaagctattccaggcagaacaccctgccctttacgaaaaattcaaaacagcaacgacatcacgcgtattcagaatgaagtaaggagaaaacatgtctaccaacgcacttaaggcggctgcgacaggaaaccaggtcgcgcagcatagcgataaaccaaccactctggctggcttgctcgcggatccaaaaattaaggctcagatggcgctggctcttccaaagcacatgacagccgaccgccttgcgcgcatcgctactacagagatccgcaagatcccaaaactggcggcctgtgaccaggccagcttcctcggggcgattatgcaatgcgctcaactcggtcttgagccaggcggcgcacttggccatgcatacctgattccgttcgacaaacgccagaaagtaaatggccgctgggaaactgtatcgacagaagcgcagctgattattggttatcgaggaatgattgacctcgcccgccggtcaggtcaaatcctgagcatatcagcgcgcacagtccatgcgaacgacaaattcagttactcatacgggctggaagaaacgctcgagcattcaccttgcgagaccggtgaccgaggagaacttacgcatgtttacgccgttgcacgcctgaaagatggcggtgttcagttcgaagttatgagccgggcagacgttgagaaagttcgtgccctgagcaaagccggaagcagcggaccgtgggtggaccactttgacgagatggccaaaaagacggtgatccgtcgcctgtttaaatacctgcctgtttctatcgaactgcaaaaagcggttgtgatggatgaacgagctgaagccggcctgagccaggataacgcagctgttatcaccggtgagtattccgtcgtagacgatgagcagcagagcatgacagcagtttctgaatctgatcgagaagaagcacgtgaatacgctagcgccattctgaacagccttgatccttctgtggatgatgcaaaggcgctttttaagcgggcagaagacgaaataaacgcactggctgaaaagttaggcgatgaataccaccagggattcatgacgacgcttaacgatatgcgtcctgaatttgcataacaccaccaccgcggcgcgcccggcgccgcactgaaaaaagagaggtaacgatgaaaggtgcattaggcaaaaaggaactgctggcggtggtgcctgtatcgatgagcactatcgaccgcatggagaaaaacggggagttccctaagcgtttctggatcacagacaagcgctgtgcctggaacagcgaagagatcgagcgctggctggacgaacgtcagcagaacggcacaacggagtttgctggaaaaaagcctccggttgagcagcgagtatttcgcccggttggtaacgcggcgtgacgtcgctggcgaggtactgggaaaggtggtcaggatggtttctgtacctggccgctgtatccgcctggctgttcctgctggcggtcatttttcgagagggttggatacgatgaatcggatggaaaaataccacgcggattatgtctcgcagcgcaaagcgccccctcttgtcgccgtaacgccggcggcaatggagatcgagcagcgcgctattgctcgcgagaacaaaggccagtaccgcctggccgctcgtctctggcttgagtgcatggatgcggccactggcgaggttgagcgggcccgtatcgctatacgccgagatcagtgcattggccgcgggaatcggcttcgccagggatgctatgccgggatctgcgccacagccggggtgatttatgactaacccacacgacagcattcgcgtaggcagtatcacgctggtttattcgtccgtgcgccgtggctggttggcgcccggcggccaggttatcagaaacccattgaaggctcagcgcgtggcggagcaactgaatagcaagaaggtggcagtatgagcgaaaaatacaccctgatctatgcggatccgccatgggcataccgtgacaaggcggctgacggtgaccgcggcgccggtttcaaatacccggtgatgaatgtgctggatatctgcaggctgccagtatgggagctagccgccgacgattgccttctggctatgtggtgggtaccgactcagccggtagaggcactgaaagtcatggaggcctggggattccgcctgatgacaatgaagggattcacctggcacaagacgaacaagcataaagggaacagtgcgatcggcatgggacatatgacccggtcgaacagcgaagactgcctgtttgccgtgcgcgggaaactaccggcccgcatggatgcctcaatctgccagcatgtcacggcgccgcgcctggagaactcgcgcaaaccggacgttatccgcgagaaactggtgcagctgcttggcgatgtcccacgtattgaactcttcgcccgccagtcttctcacggcttcgacgtgtggggtaaccagtgctcggcgccggcggttgagttgctgccaggctgcgcagtgccggtagtgaagacggaggccgcatgaacattgccgaagaggcctcgctgatacgacaactcgaagaggcgcgcgccattatcaaccagaggaatggtgagatcattcacctgcagagagaagcggcgcgctaccgtgagcagcgggattctgcaaacgcgatggttaaattcctgcgcgggctatttgagaattcttcgaaggcgacacaatgagccgcctccgggcggactattgttcattcatccacttttcaaatgcagacggggagaacggcaacaggtcgtaatgctccccgtttatccatgcatcaaccatatttgcccactgctgcagcatgtaggcccgctgccgggaatactcggccttgttgtaaaccgccctcacgcccttctgttcatgcgccagcgccttctctatccagtctgacgggaatcccgcttcatgcaaaagcgtgctcgctgtacgccgcaggtcgtgcactgttagaggttgcaggttctccccggcatccgctgccgcagcaaccgcgcgatcgatgactgagttcagagcggcattggataacggcttactggtgctgtagcgcccgggcagaagatagtcactcccgccggcacacatctgcaggcctaccatcagatcctgcgcctgaggaggaaggtagatgacgtgcgaccggctccccttcatcctgtcagatgggatcgtccaggttcctttgctgaaatccacctctttccacgtcgccatgatgaactcggttttgcgcaccatcgtgatcaggatgagcttcacagccagttttaaggttggcaacgtgctgacggtatcgagcgacctgaaaagcacgccgatttcttcaggctgcaggcaacggtcacgcggtttaaacatggcgatcgccgaaggtttgatatctgcggccgggttgaataacccgtgcccgcggtcattggcataccggtaaacgctgctgatgatttcacgcgcctgcaccgccgtcgcacgtccgccgcgctcgactatgcgatcgcaaagatcacgcaccataggggtcgttatctcggacatcattttgtttccgagaacaggcaaaatatcccggtcgataactgattgcttcatagcccgcgtactgtcagccaggaccacatgtttcatgtaggcgtcggtatgtaccgtaaatgtttcggcgccgcggatccgtttgataccgtcacgcttcgccgcagccggtgactggcctgcgttcagcagctttttagccgctatcagttcatccctggcttcagccagcgtgataccgtcacgaccatactgaccgataaccagcgtctcccggcggccgttgatgcggtaatcgtaacgaaacgagatggtgcctgagatcagcacggctacatacaacccgtcacgatcggagaccttgtacattttgccctgcggtttcagattttttagtttggtatcggtaagcacatttcacccgtgatgcatcattttttgacggtacgagagtataccgtaatggtaataccgtcaggtataccgtcaaaaaatgtgagatagagtgaatagtgttgaagtgatataaagaaaaaccctctgtaaaaacagagggttgcatttcaatttgagtagatatgattagctatagggtagccgttaatcattcccactcaatcgttgctggcggcttgccgctgatgtcatacaccacgcgggagataccgttcacttcattgatgatacggttggagacgcggccgaggaaatcgtacggcaggtgcgcccagtgcgcggtcatgaagtcgatggtttccaccgcacgcagggaaaccacccagtcgtatttacggccatcgcccatcacgccgacggaacgaaccggcaggaacacggtgaacgcctggctgactttgttatacaggtcagctttgtgcagctcttcgatgaagatagcgtccgcacgacgcagcaggtcgcagtactctttcttcacttcgcccagcacgcgcacgccaaggccggggcccgggaacgggtgacggtagagcatgtcgtacggcaggcccagttccaggccgatcttacgcacttcgtctttgaacagctcacgcagcggctcaaccaggcccatcttcatctctttcggcaggccgcccacgttgtggtgagatttgatgacgtgcgctttaccggtggcggaagcggcagactcgataacgtcagggtagatggtaccctgcgccagccatttgacgtcgtccagcttcagcgcttcttcgtcgaacacttccacgaaaacgcgaccgataattttacgcttcgcttccggatcgctttcacccgccagcgcgtcgaggaaacgctgctcgccttcaacgtgaacaatgttcaggccaaagtggtcgccgaacatctccatcacctgctgcgcttcgttcaggcgcagcagaccgttgtccacgaatacgcaggtcaggtttttgccgatagcgcggtgcagcagcatcgcggtcaccgaagagtccacaccgccggagaggccgaggatcactttgtcgtcgccaacctgctgacggatacgctcaacggcgtcgtcaatgattttcgccggggtccacagcgcttcgcactggcagatgtcgcgcacgaagcgctccagcatacgcatcccctgacgggtgtgggtcacttccgggtggaactgcacgccgtagaagcgtttttcttcgttggccataatggcgaacgggcagttgtcggtgctggcgacggttacgaagtccgctgggatggcggtcactttgtcgccgtggctcatccacacgtccagcagcggtttgccgtctgcggtcagggaatcttcgataccgcgcaccagcgcgctgtcgttaaccacttcaacctgtgcgtaaccaaactcacgctcgttagaaccttctacatggccgcccagctgcatcgccatggtctgcatgccgtagcagacgccaaataccggcacgccggcttcgaacacatactgcggcgcgcgcgggctgttctcttcggtggtgctttccgggccgccggaaagaatgatgccgcttggattaaattcgcggatctgtgcttccgtgacatcccatgcccacagctcacagtagacgcccagctcacgcacgcgacgcgccaccagctgagtatactgagacccgaagtcgaggatgaggatgcgatgtttatgaatgttttccgtcattgacgctaattccgaggcaagtgaaacagagtaaataaatcgcccgacgcaaggtcgggcgaagaaatcaggagcccagacggtagttcggggactctttggtgatggtcacgtcgtgaacgtggctttcctgaatgcccgcaccgctgatgcgtacgaattcagctttggtacgcagcaggtcaatggtaccacagccggtcagacccatacaggaacgcagaccgcccatctgctggtgaatgatctctttcaggcggcctttataggccacgcggccttcgataccttccggcaccagtttgtcagcggcgttatcgctctggaaatagcgatcagaggagcctttggacatcgcgccaagggagcccatcccgcggtaggatttgtaagagcgaccctgatagagctcgatttcacccggggactcttcggtacccgccagcatggagccaaccatcaccgccgccgcaccggcggcgatcgctttggcgatatcgccggagaaacggataccgccgtcagcgataaccggaataccggtcccttccagcgcttccaccgcgtcggaaacagcagtgatctgcggcacacccacgccggtgacgatacgggtagtacagatggagcccgggccgatgcccactttcaccgcgctgcagccggcttccgccagcgcgcgtgcgcctgcgccagtggcaacgttgccgccgatgatctgcaggtcaggatatttcgcgcgcgtttcacggatacgctgcagaacgccttctgagtgaccgtgcgaggagtcgatcagcagaacgtcaacgcctgccgctaccaacgcgtctacgcgctcttcgttgccggcaccagcgccgaccgccgcgcctacgcgcagacggccctgctcatctttacaggcgttcggtttacgttctgctttctggaagtctttgacggtgatcatgccgcgcaggtggaagctctcatccacgaccagcgctttctcaacgcgtttttcgtgcatcttagcgaagaccacttcacggctttcgccttcacgaacggtgaccagacgctctttcggcgtcatgtagacgctgaccggctggttcagatcggtgacgaaacgcacgtcgcggccggtgatgatgccaaccagctcgttttcttcggtaaccaccgggtagccggcgaaaccgttgcgctcggtcagctctttcacttcacgcagggtggtggttggcagaacggtctgcgggtcggtgaccacgccggactcatgtttcttcacgcgacgaacttcttccgcctggcgctcgatggacatgtttttgtgaataaagccgatgccgccttcctgtgccagggcaatagccagacgcgcttccgttacggtatccatggctgcggagagcataggaatattcagacgaatggttttcgtcagctgagtgctgagatcggcagtattcggcagaacggtagaatgagcgggaacgaggaggacgtcgtcaaacgtcagggcttctttagcgatacgtagcatgggcaatatctcgaccagggtggataaatattgccgtggcattatacagagcgtaaccgattgcatctacccttttttgcaaataatacttgccatcccctctgagcgcgttactatcgactgaataacctgctgatttaaagtttgatcttgctcacatgttaccctctcaatcccccgcaatttttaccgtaagccgcctcaatcagacggtgcgtctgctgcttgagcgcgaaatgggccaggtttggatcagcggcgagatctctaacttcagccagccttcttccggccactggtacttcaccttaaaagacgataacgcccaggtgcgctgcgcgatgttccgcaacagcaaccgccgggtgacgtttcgcccgcagcacgggcagcaggtgctggttcgcgccaacattacgctgtatgagccgcgcggcgactaccagattatcgtcgaaagcatgcagcccgccggcgaagggttgctgcagcagaagtatgagcagctgaaagcacagttaacggcggaaggacttttcgagcaaaaacataagcaggcgctcccctctcccgcccactgcgtcggcgtcatcacctcgaaaaccggtgccgcgctgcacgatattctccatgtcctcaggcgccgcgatcccgggctgccggtgatcatctacccaaccgcggtccagggtgacgacgcccccgggcagattgtgcgcgccatcgcgctggccaacgcgcgccaggagtgtgacgtactgattgtcggacgcggcggcggttcgctggaggatctgtggagttttaacgatgagcgggtggcgcgggctattttcgccagccagatccctatcgtcagcgccgtcggccatgaaaccgacgtcacgatcgctgattttgttgccgacctgcgggcaccgactccctcagccgccgcggaaatcgtcagccgcaaccagcaggagctgctgcgccagctgcagtccggacagcagcggctggaaatggcgatggactatttcctcgccagtcgccagcgccgttttacccagctgttccatcgcctgcagcaacagcatccacagctgcgcttggcccgccagcagaccgccctggaacgcctgcgccagcggatgcgtatcgccgtggagtcacagcttaagcgcgcagaacagcggcaaaagcgcaccgttctgcgtctgaatcactacaacccgcagccgcggatccaccgcgcgcagtcgcggatccagcagctggaataccggctggcggaaattatgcgtggccgcctcagcgagcggcgtgaacggtttggcaacgcggtgacccatctggaggcggtgagccccttagccaccctggcgcggggctacagcgtcacctcggtgagcgacggtacggtgctgaagcagacaaaacaggtcaaaaccggcgatctgctcaccacccgcctgaaagacggctgggtcgaaagcgaagtgaagcagatcgcgacggtgaaaaaaacgcgggccagaaagccttcgcccactaaaccagcggaataaattccacccgttttttcgagataaggccatgcccatgctggcaaaagtaatccaccgcgccgcacgccttcagcacctccagcggctggtggcattccgggcagcgggcctcaagggtaaataccctttcgcactgggcgcaatgcgcgctactgcctttgacatctaacggcgcgtggcacagagggcaatcaagttccataaccattcctttcaacgtttatctgcacctattttatcatgttccgggtttaatgcgggccgcgtaattgctgctgcaacctgagcagccattccacttcctcaagcctacgctgcgttagcccggccacgctgtccggcgcccggataaacagattatcagcgccgaggatctgctcatcaagacagtgcgtatagatcgccccgggccgggtccagcgctgcacccgctcgccgtcctgtagcgtcaccacttcgccctcaggggcgcgatcgagggtgattattcgcccgtcccgcagtcctattcgcattcccttttgcccgcccgcgggacccgcatatttgttgagccagatattgagcgggatagtgcccagggttccctgcagatgcgcctccccctcggcagtgctcgtatccccaggagcaatgtcatggccgaggcggtctttcgccacccgaagggaaaggctcagcgccgtatcgcctccgctggcgtgcagggtttcgcggagcatcgccaggacatgggtgccgatatcgaggatcaccccatcagggtgacgcagctgccgggtatccagctccccggtggcaaaattgagtgcgaccggctcaccagcgctgttaaagccgcttggctcctgcaaataaccttcgatccagacgatatcctgcgctgacaggtgcggcggaggcaggccgctggcctccccttccgcccgccacagcgggccaggagcgttcagcgcaacgcctcgcgccatccagtggtcaagagccagcacccgcgcggcctgctcagtcggcgccagcagcgcccgcagccgggcggcctgctcaaggttggccacgatcggcttttccaccacgatgcgggaaatgccgctggctaacgccctctccagtacgggcagatgctgaagtgatgaggtggtaatgaagagcgtatccaggggttcggccagcagcgccgacagcgaactacagcgctggatccccggcagcgctctgctgcagtccaggtcatagccctggcagcggtcgatgacgtcccccaggcgacgcagcgccggtaaataggcggtttccaccaccgcgccgaggccgataaaaccaatctgcatagtaagtccacctttgagccgctctgttcccggcgaagtatctcgggattatggcggaaggttttgacatttaccggcatggcggccacaaaaaacccgccgaagcgggtttaatgattatttgcttttcttgatgtgcttgatcaagcgcttacgtttacgcatctggttcggcgtcagggtgttacgcttgttagcgaacgggttttccccttccttgaactggatccggattggcgtgcccatcacgtccagggatttacggaagtagttcatcaggtagcgcttgtaggaatccggcagatccttgacctggttaccgtggatcaccacgataggcgggttgtagcccccggcgtgggcgtatttcagcttcacgcgacggccacgcaccagcggtggctgatgatcttccgccgccatgttcatgatccgggtcagcatcgcggtgcttacgcggcgcgtagcgctgtcgtaggcttcgcgtaccgattcaaacaggttgccgacgccgctgccgtgcagggcggagatgaagtgcacccgggcaaagtcgataaagcccagacgatagtcgagggtctccttcacctgctccttcacttcctgactcaggccatcccacttgttaacgacgatcaccagcgaacggccactgttaagaataaagcccagcagcgagaggtcctggtcggagatcccttcgcgagcatcgatcaccagcagcacgacgttggcgtcttcaatcgcctgcagcgtttttatcaccgagaacttttccacgacgtcggtgattttcccgcgcttgcgcaccccggcggtatcgatgagcacgtattcgcgctcgtcacgctgcatcgggatataaatgctgtcacgggtggtgcccggcatatcgtaaaccaccacgcgatcttcaccgaggatgcggttggtgagggttgatttaccgacattaggacgcccgacaatcgccagcttgatcggcagatcctgcggattgaagtcgtcttccggctcttcttccgcttcgccattctgctcggcttcgaatttcgcccagtattcggcgtcttcatccacttcttcctgcggattaacctcatcgacccatggcagcagggcctgctccagcaggctggtcacgccgcggccgtgcgaagcggcaatcggatagatatcgcccaagccgagcgaccagaagtccgccattgcctggtcgacgtcgatgccgtcggttttgttagccaccaggaaggtgggcttttcacgagagcgcaggagtttagcgatcgcgatgtccgccggcatcaggcccgcgcgcgcatcgaccataaacaacaccacatcggcctcttcgattgccagcagcgactgctccgccatccgggtttccacgccctcttccgtaccatcaataccaccggtatcgatacagatgaattcgcggccttcgacttcggcccgaccgtacttacggtcacgagtcagccccgggaaatccgcaaccagcgcatcacgagtgcgcgtcaggcggttaaagagcgtggattttccaacgttagggcgcccgacaagcgcgaccacaggtatcatgttaaatgcctcatacaatcactaagcaacatcgtcttaacgacgtttttaaaaaagtcaaaacggcccctgtctgccaggggccgtttcttaatcactcacgacagcggtaattaacgcgtaatcgcgtacagcgtaccgtctttcgcctggatcagcagtcgaccatcggcaaccaccgggtcggtcaggaagccggagctgtccactttctgctgcgccacaaaatggccatcttccggattaacccagtgcatgtagccttcgctatcgccgacgaccagattgccattatacaacaccggcgcggtcagcaaacggtgcagcagatcgctttgcgtccacagggttacaccgccgtcggtggtcagtgccagcaggcgatcgttctggtctaccaggtagatacggttaccatcgacgatgaaatcattcaccgaacccagctcgcgtttccacataatctggccgctacgcaggtccagcgcggtcaggttaccgttataagccagcgcataaaccacaccgttaacgatgatcggcgtcgtgtcgacgtcgttcaggcggtcaatttccgtcgggccggtggccgtagaaatacgctgctgccaaatcatctgcccctgctgcatcaatactgcactgacgcggccgttgtcgccgccgacgatcgccgcgccgtaggcggtcgcaggcgcagactcgccgcgcagggagagcgccggcatatcgaggttaacggtccacttcacggccccatcggtctcgtttagcgcctgcagctggccgttactggtatgcaccagcaccatgccatcgctcaccaccggacgcgacagcgcctcgccggcgacacgggtttgccaggccacggtaccatcgctggtattcagcgcatacagctgcgctttctcgctgccgatataaacatggccgccagagacggtcaccccgccagaaagcagcgctggcgtgcgcgagaaccagccatctttctccgccagattcaccgaccacacctctttgccgtcgtcggcgttcagcgctttgacggtgcctttacggtcagcagcatacactacgccgtcggcaaaggccggatgaaggttagagtaaaattcgccgataccatcgccaaccgaggtgctccaggacgtggacggcgtaaactggttttctaccgtcggcagcggtgacattttcaccacatcttcttcgctattaaacagcgaacacccgctcagcaaggtaacggaaagcagccctggcaacagtaatttacgcaattgcatcgagtccctctcagatggacaaattattcattttcatacgcatcatttcgctgagcgcaggagaagcatcgcttttcacgccagcttcccacgccgcacgggccccttgcttatcgcctttgctcaacagaatttcgccgcgcaaatcggccacaatggcggtccagccctcacctttgatgctgtcgagggttttcagcgccgcatcagcctgtttcatttgcagctgaacgcgggccagacgcatactgataaccgatttcagattatcatcagatgcggccgccagcccctgctgcagctgcttttcagcgttcggcagatcgttctgttcaacaaaatgctgtgccagctcgagagaggcgaaggcgccgtaggtatttttattgtcagccgcgaatttctctgcccctgacagcacttctggcgtattcgatttcagcgcggaagtcgccttctcgtaagccagcgacgcgtctctggcggtatcctgctgatgggaggtccagtagcgccagccaaccagcgcgccaatccctaaaatcaccccgaccgccagcgctttgccgttttcggcaaagaaacgcttcagcgcatcgacctgatcgttctcgttgttaaaagtttccacgcagtccttctcctgactaataattcccgggagattaacccagaagtgtgcgcaaatgcgcggcaacgctctcctgcgttacggtagtttgctcacctgagcgtaaatccttcactaccacgtttccgtcagcaatctctgattcaccgaccaccagcgcgacgcgcgccccccacttgtcagcgcgggcgaactgcttcttaaagttgccgccgccgtggttggtcatcagcttcacgccgggcagcgcatcgcgaacctgctcagccagacgcattgcagcagactgagtatcggtcccggaggctaccaggtatatatcgacaacaggatcggctttaaattccggattcactgcctggaccagtaaaacaagacgttccagacccatggcaaaacccacgcccggggtagcgcgaccgcccagctgctcaaccaggccgtcgtaacgaccgccggcgcagacggtgccctgggaaccaaggctggtggtcacccactcgaacacggtgcggttatagtaatcaaggccgcgcaccaggcgctggttgacggtgtagcggatcccggcatcgtcaagcagcgcgcacaggccggcaaagtgggctttcgactcttcgtcaagataatcgccgagcgccggcgcgtcgttgagcagcgcctgaacgtccgggtttttggagtccagcacccgcagcgggttggtatacatccggcgtttactgtcttcatccagtttatcggtaaactgctccaggtatgccaccagcgcgtcgcggtagttggcgcgcgcttccagcgaaccgatggagttcagctccaggctgacgtgctcggagatgcccagctcacgccaccagcgcgcggtcagcataatcagctccgcgtcgatgtccgggccctgcaggccaaacacttcggcgccgatctgatggaactggcggtagcgacctttctgcgggcgctcgtgacggaacattggcccgacgtaccacagacgctgttcttgattgtacagcagaccatgttcgatgccggcacgtacgcagcccgccgtcccttccggacgcagcgtcaggctgtcgccattgcggtcttcgaaggtatacatctctttttcaaccacgtcggtcacttcgccgatcgcgcgtttgaataacggggtctgctctacaatcggcaaacggatttcgctgtaaccgtagctaccgagcacctgcttcagtgagccttcaatgcgctgccagagagcggtttcgcccggcagataatcgttcatgccacggatggcttgaatgttctttgccacgtttattctctttatatatacaaaaatgaaccccggcgcctcgcgcccgcaggttcaatcatacacgggaagcgtatcgcttcccaacacgttattttgcttcaacctgttgaacgtcaatccgacgggcttcatcgagcatcgaggctttggcgcggatccgcgcttccagctggtcgatcatgtcgttgttgtccaggcgatctttacgcacgccgtcttcatacaggccgcttttcttgttgccgccggtgacgccaagggtggagaccagcgcttcgcccgggccgttcaccacgcaaccgatgatcgaaacatccatcggggtgatgatatcttccagacgctgctccagagcattcaccgtaccgataacgtcaaactcctggcgtgaacaggtcgggcaggcgataaagttaatgccgcgggaacgaatacgcagagatttgaggatatcgaagccgaccttgatctcttccaccggatccgccgccagcgagacgcgcagcgtatcgccgatcccctcggacagcaggagtcccagaccgatcgccgattttaccgcgccgctgcgcgcgccgcccgcttcggtgatcccgagatgcagcggctgatcgatctgtttcgccagcagacgataggattccaccgccaggaagacatcggaggctttaacgctgactttaaactgatcgaagttcagacgatcgagatgatcgacatgacgcatggcggattcgagcagcgcctgcggcgtcggctcgccatatttttcctgcagatctttttccagcgagccggcgttgacgccgatgcggatcgggatgtttttatcgcgagcgcaatctacaaccatgcggatgcgctcttcgttgccgatgttgcccgggttgatacgcaggcagtcgacgccatattccgccactttcagcgcaatacggtagtcaaagtggatatcggcgaccagcgggacgttaacctgctgtttgataagtttgaacgcctcagcagcgtccatcgtcggaacagagacacggacaatgtccgcgcctacgcgctctaacgctttgatttgatttacggtcgccgccacatcggtggtgcgcgtattggtcattgactgaacggcgatgggagccccatcgccaattggcacattaccaacgtaaatacgtttagattttctacgttgaatcggagcctggttatgcatgaaaaatctcccgcgttacccgtctgttactgcgccggtgatgattcggcattgagggtcagacgcgcaacctggttagttctgataaaacgacttaaatcgacaggcttgcccagatactggatctgtaccgcggccggggcgccaattttcagcttatacggcgcctgaccgctcaggttcaggttaccacctttacgctgcaggccgctgaacagttttttaccggtggcatcgctcacttccagccagcagtcggcggaaaagttcatcaccagatcctgcgccgacgccgccggagtcgtgacgttcgcctgatcggtcggcaacggcgaggctggggtggtagccggagctgccggcgtcgtccccgcggtatcgacattggcctgggaaggggccacgacagcgttattatccgctggcgtctgggccggcgcgctggtggtcggtgcgctggcggtatcggttggcgcgctgttcgcggcgctatcggcggtcggggctgcaggggcgctggtatccagcggcacgttctggctgttggcgtcgccgccgttcagctcagcggaagactgatcggccatggtcgaaatctcttcctgctgcgccttatggtcttgccaccaccaggcgccgctcagaccgataaccacaaacagcaccagccaggtgaagctcatcagccagccgtcgcgctttttgcggcgcttgcctaaagagaaactctgcattggcgcgactttcgccgcgcggatgggcgcctgcttggccatcatcggcagcagctcgtcttctggaatatgtacgaggcgagcgtaggagcggatgtacccgcgcaggaaggtggaggcgaggtcggcgggggccttatcgtcttcaatatcacgaaccgtggacaccttcaggcataagcgttcggccaccgcttgctggctaagtccgagttgttcgcgggcgtgacgcagacgcgcgcccgtggtgtttgcttcttgatgatcttgagtggcttcagtattcattcgctacaactactggtacgtgaaatttaaagttcagcgcgggaaaaagccggcgccgcgagacatctgtgctacgtcagcctcacagtataggactgtcagccgcgcgatcacagagacgaatcaaaattgaatgctaagcggttgttgtgccgctacatactgcctcaaagtcgacaaaaacgcaccgtaattattaaccgaatcagcgtatttcgcctggctatcggccataaatatgacccgtgccgcctgcgctgcacgggtcatcatttgtcagaccgcttttacgtcaatcgcttcgccctgcatccgcttacgcagcgtacgcttggtacggtcaatgacgtcgcccgccagctggccgcaggcggcatcgatatcgtcgccacgcgttttacgcacgatggtcgtaaagccgtactccatcaggactttggagaaacggtcgatgcggctgttggagctgcggccatacggcgcgcccgggaacgggttccatgggatcaggttgatcttgcacggcgtatctttcagcagcgccgccagctcatgggcgtgctcggtgccgtcgttgacgtgatccagcatcacgtactcgatggtcacccggccctggttggcgttggacttcgaaatatagccgcgcaccgagttgaggaacgtctcgatgttgtactttttgttgatcgggacgatttcgtcgcgaatggtgtcgttcggcgcgtgcaaggagatcgccagcgcaacgtcgatcatatcgccgagtttatccagcgccggcaccacgccggaggtagacaaggtcacacgacgcttggaaaggccaaagccgaaatcgtcgagcatgatttccatcgccggaacgacgttgttgaggttcagcagcggctcgcccatgcccatcattactacgttggtaatgggacgcacgccggtggtcttcaccgcgccgacgatcttcgccgcgcgccagacctggccgataatttcggatacccgcaggttgcggttaaagccctgctgggcggtggagcagaatttgcactccagcgcgcagcctacctgggaggagacgcacagggtggcgcggtcttcttccgggatatagacggtctcgacgcgctgatcgccaacggcaatcgcccatttaatggtcccgtcggttgagcgttgctcttcaaccacttccggggcgcggatctccgccacttctttcagtttactgcgcaggactttgttgatgtcggtcatctcatcaaagtcgtcgcagcagtagtgatacatccatttcatcacctgatcggcgcggaaaggcttctcgcccatgtttttgaaaaactcgcgcatctgctgacggtttaaatccagcaggttgattttggcatctttgttcggcaccgtcagagcggcggtatcaggcgtgacaatttgttcagacataatattttccggcctcgttattacacgttatggccccaggtgggttgaaaaagaaacgccccggagagcgactgctcgtccaggggcgctatattctacaaattctggcgcatcattgccacgtttgcacaaagcaatgaaaaaaaatctgtaactgactgctcaatcctctaaggcttttcgattgtcgcaaggcggcaagcaagtgacaaattcgtcgggaacgaatttgaccagccgtaggctggcctccggtgagaggcaggagcctctcattaatccccgggagcatagataactatgtgaccggggtgaacgcgcgcagccaacgccgcgacggtcgaaaagacgaggtttgtatctccaaagtatttcaggtcacagcgagacggcgagttcgcaaatccccgggagcatagataactatgtgaccggggtgcgcgaaggaagccaacaatgctgtggcgtgaaagacgcaggagattagcgagtgcgcgggcaaacctcgccttcagcaaagaagaacgcgatttcgcgggcagcggattctacagagtcggaaccgtgggtgccgttctcggtgaagctgtcagcgtagtcagcgcgcagggtacccgccagggcgtttgccggattggtggcgcccagcaggtcacggtgacgctgtaccgcattttcgccttccagaacggaaaccacgatcgggccggaggtcatgaactcaaccagaccgtcgaagaacgggcgaccttcgtgctcagcatagaaaccacgagcctgttcaacggtcaggtgcagcattttggtgccgacgattttgaaccctgcagcttcaaagcgggaaaagatgctgccaataacgttttttgccaccgcgtttggtttgatgatggaaaaagtacgttcaatagccatgattacctctaattaaatgttctgttgttgcacatacgattgtatggcctggcgcgcattataatgagcatccccgcccctgcctacggatgaaggtaacattttgttaaaataagatgagtattgaaaacacaaaccgccaacaacaaatttaccctggttattgcagggtaaagctggcggctgccgtctggcccgcttcatccatcaccaccaactgccactcgccgggtttatccagcgttagcgtggttcttgcgccggcggcctctaacggttcgccattaataaaccaccagcgccgcccctccccaccgctggtttgtagcggcaacatcacccgcgcctcacccgggagacgttttatcactgccccatcacggatgccggacagcaccagcggcgcggtatcctgagtctgtaacggcgggcatgactccgatgccggtcccaggcgcgcgcgccgcctttcgctggccggcagccagggatccagcggcagcggccagacttcgacctggctttcccgagcgccgggacaatccgccgccacccgttcgccgtgttcattgcgccacaccgggaagcggatcccgcgtacgctctcctgccccggcagcagcagagtcggcggctggctggcatccaaaagccagctggccaggcgacgacgacagttgctgtcgcccgccggcagatcctgcccgccaggccagcagattgtcccctggctgaccgttgccgggcgcggatcgctcggcagcccgccgcggctcatcgccgggcgggccagcagcagattattgacctggttgagcagcggtacggcgctggcgaagccaaactggcccaccaccggcgtaccgtccgggcgcccggtccagatgcctatcagatatcgcgcattgaggccgaccgcccacgcgtcgcgatagccgtagctggtgccggttttccacgccagcggcaccgcctgcggcagcgaggcatcgggaaccggttgcgcttcgccggccaaaatacgccggacgatccatgccgccccgggcgacatcagcgcgcgctcggtcaatgggtcgctcggcttcaggcgcagccgcgccgccttgccatggcgggcgaaggcgctgtacgccgcgacaatatcttccagccgcgccccggcgccgccgaggattagcgacagattcggctctgcgccagcgggcagcgtcaggggcagcccggcgttgcgtaaattagccgcaaagcgttttggtccataggcttcgagcacctgcaccgccggcagattcagcgaccgaaccagcgcctcgctggcgctcaccgggccatgaaacccgctgtcgaaattaccggggcgataatcgctaaaacgccgtggcacatcctgtaatagcgatgccgggtgaatcagcccctcatccatcgccatcgcgtagataaagggtttcagcaccgaccccggcgagcgtaccgccgagaccatatcaatatggccgaagcggctgtcgtcggtgatatccgccgagcccacccagccgcgaactttcatatccgtgtggtcgacgacgaccatcgccagcgaactgcgcggcggcaggcgcgatttccagttcagcgccagatcttccagttgccgctgcagtccggcatccagagtcgtcaccaccttttcatcacgactggtcgccagcgcccggcgtgaaaaaagcggcgccagctgcggcatctggcgcggaaacagccatactggctcctccatcgcttcctttaccgcctgttccggccagacgccctggctgaccattcgcgtaagcactttatcacgcgccgcctgggcccgctgcggccagcggtccggacgtaaacgactgggcgcctggggaagtaccgccagcagcgccgcctcgccgtagctaagactggcaggcggcttaccgagataggcccagctggccgcgccgatcccctgcagggtgccgccaaacggcgcgcggttcagatagagggttagaatgtcgctttttgacagatgccactccagctgcagcgctcgccacagctggcgcagcttgccgccgaaggtgcgtggatggggatcaagcaggcgtgccacctgcatggtaagcgtgctgccgcccgagataactcgcccggaagtaagatcctgccaggcggcgcgcagcaccgcgaagggattgacccccggatggcgccagaaccagcggtcttcatactggatgagcgcctgcagatagcgcggcgacacgtcggcgagcgtgaccggataacgccagacgccctgcgcgtcggcaaaccgccacagcggcgtcccgtcttccgccaccaccacacgggcaggcgtgacgtcatgcagcggcagcggccacaggcgatcggccgccagcaccgccagccacagcagaaaaataaacgccgccagccagcgccagcggcgttttacccgaggcaatacgcgcatttacggcgtcacggtgagcggaccgctggccgctcctgtcgcccgccactgcggcgcatacatcgattccacctgcggctgcgggacctgataagtgcccggcgtcaccgcccgcgccagatagaccagcgtcaccggctggccttcattgacagcgacggcggcgacgaaacggtcatcgcggaactcgatatgctgaatatccgcctgctgcatctggttaagcaggttttgcaccgcgtcgccattctcctgcaggctggcgctgctgttggccagattctggttttccagctccagaccggctggcaacagatcaaccaccagcgcgtcaggaacgttacgtttggcggtcacctccagcttgaccagcaccagttcgccgctgcgcagcgaggtcagcgatttctgctggccgtgggtatcgaaaatagcgcgttcaatccccaacacgttgcctcccggctgtggcgcgctttgcggataaccgctgctatcgaggcgcagccacagcggctgactgccggtattactcacctgcagcgccgccagccgatcgccgtcgaggttgcgggtttgcgctttgtcgccggccaacggctccgcctgcagcgaggttttcgcctgccagctgcccggcaggtccgccagcgtacgtccggcaaggaacaaggcgttggtttcctgggtcgacagccagcgctggccataggcctcttccgacagcgtgctcaacagctgattttgcacctccggcagcagcttattctcttccagcagcgccagtttcagggcgttgtcgcgcagcgggctaccgtaatcgcccagccaacgattctcatcctggcgcggggtggcaaccgccagcttcagggcggcgtcgccgcgcggcgcatcgcccatagttttcagcgcaatgccgagctgcagcagcggcaagccggatcgcgcctggtcgtgacggctccagatttcacgcaaggcgccgagcggcgctttttgctgacgcgccagcaccagcgcggcgtatgcctgggcggcaaagcggctggcctgggcgtcgtcgctgtagcgcacggtcatcaggcccggctcctgcagatagcgcagcaggcgctcgttgcctttattaatggcgttgaccggtacgctatagccctgctcgctggcacgcacgaggaagtccatggcgtaggcggtcagccagtactcttccggcccctctctatcccatagcgcaaagccgccgttttccagctgcatctgcagcaggcgtgaaataccgacatcgatggccgcgcggcgtttttcgtcgctgtccccgctaatgcccagcgcctttagctgcgccgcgctggtatacagggacgggaacaggccgctggcggtctgctcaaggcagccgtaaggataggctttcagctcgcggatatagcgggcgagattcaacggtggtttaccgctgagcagcagttggccctgcagcgtttgcggggcaaagccctggctctgcgccgccggcggctgccagctttcacctggctgcagcactgcgccgctgttgacggtctgtgccgggtacgccggacgcacgccgattttccactgtttttgcagcggggcgaaggtttcgcccggcaggctcaggccgctgatggaggcattaacctgaccatcgccgaagcccgccagcgcgctcactggtataaacagcgtgctgcgcgcccccggcgccagttgcaccggcggcagttggccctcgctcaacgttaccagcccgctggcggtaagatgtacctgcagggtttgcggtttatcggtcagattgctgagatccagcgccagccgtgtggtatcgccgctggcgaggaagcgcggggtgttcagttcggcgatgaccggggcggccaccaccactttatcttcgctgctgccgaagtcatccgccgtccacgcctgggccatcacccgcagctcgccgttaaaatcgccaatgggtaacgtcaccgtgccttcgccctgatcgttcaataccaccggctgcgcctgctgggcgacgatcgtcacgtggttgaccggcggtttgccgccgcgttttaactcgtcgccatcgccgccgaagcgcaggctggccacacgtccctgcccttcgatcacctggccgtagatgtcatagatatctgcgccgtaacgcttctggccaaagaaggcgttccacggatccggggtagcgtaatcggtgatattcagtaccccgctatccaccgccgagagcaggacattgacctgtttcggcgcctcgccctctttgacgctggctttcactttcaccgtcagcggctggttggggcgaattttgtccggggcctccagcgccagcgtcaggcgacggttttcatcgcccagcggcagatgcagcaggcccaccgcgcgtttcggcgttgccgagcgcgatttatcgccgggacgaaccaccagcgtgctgaggtagaggtcgtggcgattccaggttttatccaccgggatcgacaggtccatcccctccgccgggacgtcaatttcctgccaccacagcggcccttcgctggattccaccattgcgtagcctttacccgccgccggggcggcgatgtgcagcctgatggtgtcgcccggtttatagctcggtttatccagcttcatggtgacccggtcaggacgcgccgcgccggcgccttcgctgttatcctgccagctgtagcccgcccagaagcgcacgctgctgaccacgtcgtccggtcctttcacctccaggcgataggatccccactccaccgggaagctcactttgccgatctggccggcctgcaggtccagcgactcctcgccctcctgcagatctttttgatcgaactgcgactgccagccttcgctgtcggaccagttccagtagtagtcgcgccgctcgcggatcagccgcacctggagaccggagatcgcttttttctcgcctttgacgtcggcatagacgatatcaaacgcggcgttactgttttcatccaccaccggctgtttgacggtggtatcggtgcggtaatcgtaaacgtccttcagcgtaaattgcgggcggatccccggcagcgcctcggcgggccagatcggctgcttaaccgtacgggtcaccgggcgaccgccggattccagcaggctggcctgcaacaccacctgcagcggcgaatggctatcctgccactggcttgaggtggtcacttcgccatggcctttttcgtccagcgtcagctggacttcatccagactacgggagaggttttcttccgcaatatcgccgaactggaagcccggcagcgcagcgacggcgtcgcgcagcgggcgcaggaacagcttgccctgcagctggttgccgctggccggcgcgccgtagagataagcgccgctaacgccaaaggtgacgtcggcatccggcgcgactggcgcggcctgcggcgtcaggttcagggccatgcgttccggcataaagtcttcaacgtggaaatcccattcgcgcggctgattgtcgccggcgctggcgcgaatgtgccacatgccggtagccgcgccgctgtcgagcggataagtaaactggtacaggccattcactggtttgctcatcaccgagcggatcacctggccgtccggctgaaccacctccagtttcaccggctgctccgccagcggcttgccgtcgctatcgcgcaacagcgcattaaggatcaccgtttcgccgggacgatagagatcgcgcgggccaaacataaagaactgtttgctaaagccgggcgcgcctgcgatagagaattccgccagatccaacgccggcagcttgaggtcgagcagcgtggtctgcccctctttgcgcgccagcagcagcgcggcttctttatcggtttgcagggtgacgtggccctggctgtcgcttttcgcttccgccagggtctgccctttggcattgagcaactgcacctcaatgcccgactgggcggcgccgttttccagactctgggtaaaaacgtccagccggttatggtagcgatgcgccgagacgccgatatcgctgagggtaaacagcgtcgccgcgttgctgtagctataacggcccgccgggttcatgaccgccacgtagacgccaggctgctggagcggcttgatatcgctcagcggcagcagcagcttttcgcgagtattacgcgccgggttgagatcgaagcggccggtatagaccagatccgccatcttcagcagttcatcagattcccagttgcttaacgagttacggtattcccactgactgacaaaggcggagagcgattccggcttaatgcggaagaaattaacgtcgacattatcgacgttcagcgccatcaccggcagcccggcgaccacgttgcccggcagcagcgagccgcggctggcaaacccaacgctcggtgcgatatcgcgggtggtcagggtcttctcaaacggtttgtcgagcgtcgccttgttcagggcggtcagcgtcgggtcgactgagacaatcagctcgcgctttggctcaaggtgacgcagacgcagctctttcagattcggcgccagctcccaggcaccgtccaccttaccgcttttcttgtcgaccagatgcacgctgcgcgagaaatcctggtccggctgcagcgggacggaaaacgtcagcaccagggtcgcggcgccatccagttgcacctccgaggcgtcgaggagcgtcagcgctttaccctggcttttttccgccagcgccgccagctgggcgcggtccggttttgccgtcgcgcctgggttgctatccgcggctggcgccggggccgaggcctgcggtgtaccgctgtcatcacacccggttaatgaaaatgcggtaaggagcgccagtgatagcgccgctaaacgaaatggtttcatccttctaacccctcggccgatgagcctgatgcaatttgtcacatttattatgcgttatggcggcgcttctcaacagtgacgaagcgggtttctgccgattaatcagaaaagtgccgtgacgccgtccccactctggcgtccttaacttgtcagcgccagctaaaacgccgacaattcagtcatgaataataaaacggaggcacctatgtccacctcgttttttgtcgctgccgactggctggcagaacatattgatgacccggaaattcagattatcgacgcccgcatggcgcccgccgggcaggaggccctgcgggatatggccgcggaataccgcgccggccatgtgccgaacgcgctgtttttcgatatcgaggcgctatccgaccacaccagtccgctgccgcatatgatgccgcgggccgaagcgtttgccgtcgccatgcgcgaactgggcgtctgcagcgataagcatctggtggtctatgacgaaggcaatctgttttccgccccgcgcgcgtggtggatgctgcgcacctttggcgtagagaaggtgtcaattctggccggcgggctggagggctggcggcgcgacgaactgccgctggaacaagggatgccggaggtggccgaaggggaattcgacgtgcggttcgatcctcaacaaattaagcgtctgaccgacgtcctgttggtcagccatgaaggatcggcgcagattgtcgatgcccgtccggcggcccggtttaacggccaggccgacgaaccgcgcccgggcctgcgccgcgggcatatccccggcgcgctgaacgtaccgtggacggatctggtgattaacggcgaactgaaaaccgttgacgagctgaacgacatctttttacgtcagggtgtcgattttgaacggccgatcatcgccagctgcggctcgggggtgacggcggcggtggtcgtgctggcgctcaccacgcttggcgtgaacggcgtctgcctgtatgacggctcctggagcgaatggggcgcgcggagcgatctgccgattgaaccggcccctgccgctccgtaaacacagcgtgaccgcgggcctcccgttccgcggtcactaaataatttctgattttctctcccactttcttctgcttctcgctaaaccggttactctgtgctgccgcagggcttgttcctgccgagttcgctttgcctgatggggaggcagagcactggtacagaattcctcagggctgatagcgcatccagtccatcccaatctgatgtcaccacaaggagtgaaaatggcattagtctctaacccacattcggcttattcaccgcgccttccctggctgggaggtatagctggcctgctggcaggcggcgcgatcctttatttttggccgcaatggaaccggacatggctaagcctggtgcctgcgccagtctccgtgtatacccgctttctcggggtcactctcgaagacgttccgttagtcacctattgccatcaggcgctgctgggttttctgatggtgctgctcgctcccggttacggtaagtcgacccttgccgcgtggatgatgcataacccagcgtcaagccgtcgctggcccggcgaggtattccgtgcctgggtcacaaaatttggcctgctggtcattgtcttttgcaatctgttctttttgtcccgggtcctatccggaaccctggcgttatatatttttattctccagcacatcagcgttgccgcggcggtggcgtcaggggtgctgctcctgcgtgacgcccggcgcctggcccgcacgttcgacgctcagctggcggacctgcgtcttctcatgatacttaccctcgggttccagacgattttgccggcgcagatcgcgctgatgagcgcccggggcgtgaatacgccgctgggctggtacattgttatcgcgcaaatggcaggggtgttactggcgtttatgctggtcggcgggctggtggcagcgctacgttctctgctgggcgaagagaggtgccgggcctggcgcggggatatggcgctcttcaacggcattgtcacgctgtgcgtgacgggatttctcctctatcacatggtgtctgcctatccgcgaatctttgccgccctgcattagcttttgccaccccgcttttgtgcctcgaactggaagcataaagaaacagcgggggctgccgcccccgctgtcagataatgcggttctgcttaaaatcgcgcaggaagctgccccagcgcttttcatagaacggcgtgatatgggcaatcataaaatggctgatgcccttctcgccttccaccacctggcaaatatcgataggttcgtcgcctggcaaggtatcggtggccacgctgccggtggtctggataatggcttcaatatccccttccgcttcaatcccgatcaataagttggccggcgcgtcggcgcgctctttaatcgagcacagaaacgcccgcttgacggtcttcagcgttttgaacaacgtggttagcgaatcgaccatctgcgccggcggttcggcgacttcagacagcagcagcgcttcgccgccttccagtaccgtctgggtgctcagtgggctgccctcttcgcctaacagatggctgatttcccgtggggtgaactctttgccgctcggcagcttcgggttgaggaataacgattcgcccagcgtcatcgccatcagcgtgcgggccggcatcatcacgaaagcctgttcatccgccaccgcctgctgcagcgcctccagcgaggtaaagaatgggatcaccgaggtaccgtcgtctttttcccaatgctgcagatccagcgcgctatcttcgacaatctgctcgccatcggctgccctgcccggcacccagacggtggcctccagcagcgcgctgaaaaatgccggacgatgggcgggctcagtcgccgctttttccagcagggtttctaattcattttttgtatctgacatagtttggctacttcacaatgaattgcccggcggccattcgtccacgcgggcatatggttttcctggccgggtaagcgcagcgccacccggcaaggccattactcagctgtcagcaggttagcaatggtacgcacgccaagcccggtggcgcccgccgaccactgctcaacggcagatttgcggtaggttgccgaacagtcgatatgcagccaaccctgatggtagttttccacgaagtgggacaggaagcccgccgcggtgctggcgccggccggataggccgcgctgccggtgttgttcaggtcagcaaagttggacggcagctggttgcggtggaactcggccagcggcagacgccagaaggcttcgttttccgcctgagcgctcgccagcaggcgattcgccagcgcatcgtcaaagctgaacagcgcgtggtaatcattgcccaacgcggttttcgccgcgccggtcagggtggcggcgtcgatgatcagctctggcttctgcgccgaggcgtcaatcaggccatccgccagcaccaggcggccttccgcgtcagtgttcataacttcaacggttttgccgttgcgataatgaataatatcgcccagtttgaaggcgttaccgctgatcaggttgtcggcgcagcacaggtagagcttcacgcgtttgttcagaccgcgggtaatggcgaaagccagcgcgccggtgatagtcgccgcaccgcccatatcggatttcatcgaatccataaaggcgctttgcttgatgctgtagccgccggaatcaaaggtgatgcctttgcccaccaggcaggcgtataccggcgcctctttatcgccggtcgggttatagtccagcgccagcaggaccggcggacgctcggagccgcggcccacggtatgcagaccaagatagccctgctcgcgcagatcttcgcctttggtgatgcgatagcttatcttctcacccgccacgccacacagcaggtcgacagcgcgctgcgccagctgctccggacccagctcttccgccggcgcattgatggtgtcgcgcacccagtcgatgatcgtcaggcggttatccagctcgctgcgctgcgcgtcgtcaagggatggccattcgacctgacgctgacctttcggccctttatagccggcccaaaaggcccaggcgcgatcggtgttccagccttcgccgctcagggcgacgtgcttgatgcccatgccgtcaattttgcgcgccgcgcgctggataagcccgaggtcgtctttaccgttgagatgtagagcgatgccgtcgttattgatgctccaggtcgctttttctccccagcgtccatcggctggctgagtagaaagcgtaatcttcatagcttcggtcattatcattatccttcttagcaaacgggccaccctatggcagcccgttaaaatgttttcgcttaacgcgaaattattcggcctcgtctagccagactagcagaatcgcctcgagaattttttcattggatgcgtttggatcatcatcaaactcttccaaatcgcaaatccactgatgcatgtcggtaaagcgaacggttttcgggtcgagatccgggtaagcgtcatacaaggcttcgccgatttcgcgactgtcggtccatttcagtgccatattagtgctcgcgtgcgtggttgatggtgtaacgcgggatctcaacgaccagatcttcgtcggtgacgcgcgcctggcagctcagacggctgtcaggttccagcccccaggctttatccagcatgtcgtcttcatcttcgctactttccgccagcgagtcaaaaccttcacgcacgatgcagtggcaggtggtgcaggcacaggatttttcgcaggcgtgttcaatttcgataccgctacgcagcgcggcatcgagaatggtttcaccggtctcagcttccacaacgatgccatccggacacaggtcctggtggggcagaaatacaatttttggcattttaaacctcgtccacggattggcctttcagcgcgatacggaccgactgatccatacggcgagcggcgaattcctgggtttgtgtgtcgatatttttaatcgcttctttaatcgcgtcagcgtcgtcgcctgccgcggcggcgcgtacctgctccgcagcggcatcgatggcctgacgctccgcggcgcttaacagcgcggcgtcggcggccagcgcgcttgtcaggctctccagtacgcgcgcggcttccactttctgttcagccagcatgcgcgcctgaatatcctgttcggcgtagctcatcgaatctttaatcatggtggcgatttcgccatcggtcagaccgtaagacggtttcacctggatggaggcttccacgccggtcgatttttccatcgccgtaacgctcagcaggccatcggcatccacctggaaggtaacgcgaatatgcgccccgcccgccggcagcgccgggataccgcgcagcgcaaagcgcgccagcgaacggcaatcctggaccagctcacgctcgccctgcatcacgtgaatggacatcgccgtctggccatctttgaaggtggtaaactcctgcgcgcgggccaccggaatggtggtattacgcgggatcactttctccaccaggccgcccatggtttccaggcctaacgacagcgggataacgtcgagcagcagcagttcgctgtccggcttgttgcccaccaggatatcggcctggatcgccgcgccgatggcgacaactttgtccgggtcaatggaggtcagcggagtgcgaccaaagaactcgccaacgcgctcacgcaccagcggcacgcgggtcgaaccgccgaccatcaccacttccagcacttcttgcgcttcaacgccagcgtcttttagcgcccgacggcaggccatcagggtacgttttaccagcggggcaatcagatcgttaaactggctgcgggtgatatcgccctgccagccgccgacctcgacgtgcgctgcctcggcatcgctcaaggcgattttcgccgcgatggcggcatccagcagctcacgctgcagacggttatcgctgcggtcgctgaagcccgcttgctcgcgcaggtagtcagccagcaggtgatcgaaatcatcgccgccgagagccgagtcgccgccggtggccagcacttcaaacaccccgcggcttaaacgcagaatggagatatcaaaggtgccgccgccgagatcgtagaccgcaatgaccccttcctggccggagtcgaggccgtaggcaatagccgccgcggtcggctcattgagcaggcgcagcacgtgcaggcccgccagacgcgccgcgtctttggttccctggcgctgagcgtcatcgaagtaagcgggaacggtaatgaccacgccgtcgagttcgccggccagcgcttcggtcgcccggacggccagcgctttgaggatatcggcggagacgcgaatcgggttcagcaggccgccggcggtctggatcatcggcaggccgttttcactggcctgcagctgatacggcagatgcgggtaacggttttgaatatcggcgagagagcgccccatcatccgcttcacggagctgatggtattggcaggatcctgagcggcgttaagccgggcgtcatagccgacggtcagccccgaagcgtggtagttcaccaccgacggcagcagatagcggccttgatgatcgggcagagtctcggcctggccgctacgcacggtagccaccagagaattggtggtgcccaggtcgataccggccgccagacgacgctggtgcggcgcggcgctcaggccgggctcactaatttgtaataaggccataattgcttccgaaaattaaaaatcgagcagtttttcttcgagttcttcagcactgctgcgcagtttatcgaggaaacggagcttacgaaccgtgtccgccgccgcctcccagctctcattatgcaattggtcaaccatcagctgctgacgggtatcaaacagcgctttcacccgtttgataaaaccttccagccgcgcgtcgtctttcgcctggccgatctcatccagctcttcgcgcaattccagctgttccatcaggaacgcggtatcgcgaacggtatgctgctcgctggccagatcgaagccatgcagcgaaaggagatattctgcgcgagtcagcggatggcgcagcgtctgccaggcctggtttatagtggcggaatgctgaaccgccgcaagctgttccgccgcaggcgcgctggtaaatttatccggatggtactggcgctgcagatcctgataccggacagccagttgttcaagcgagagggtatagctggctggtaacccgaagagggtgaaatagtccatagtaacctcagggtcatgcatctaaattaaaaccccacgcgcggcgtgaccgcggtggggttgaggagtaccgattatacgttaaagctttcgccgcagccgcactcatctttgacgttagggttagtgaatttgaacccttcgttgaggccttctttgacgaagtccagctgagtgccgtcgaggaattgcagacttttgccgtcgatcacgaccttcacgcctttgtcttcaaacacggtgtcttcagccgccggctcgtcaacaaactccagtacataggccatacccgagcagccggaggttcttacgcccaggcgcaggccaaaccctttaccgcggttcgccaggaaggcattgactcgcgctgctgcactgtcgctaagagtaatcgacataacaaaacctcaactaattattttgcttcacgtttgcttttgtaatccgcaatcgcggctttaatcgcgtcttccgccaggatcgagcagtggattttcaccggcggcagttccagttcatcggcgatatcggtgttcttgatcgcctgcgcttcgtccagcgatttgcccttcacccactcggtaaccagggagctggaagcgatagcggaaccgcagccgtaggtcttgaagcgcgcgtcttcaatgataccttcattgttgactttaatctgcagcttcatcacgtcgccgcaggccggcgcgccgaccatgccgctgccgacgttctcgtcgctgttgtcaaaagagccgacgttgcgcggattctcgtaatgatcgataactttttcgctgtaagccatgatgaattctccttattggtgccgaattagtgatgtgaccattcaatgctgttcagatccacgccctgtttgaacatttcccacagcggagaaagctcgcgcagacggccaatggatttgcgaatcagatcgatggcatagtcaatctcttcttcggtagtgaaacgacctaaagagaaacgaatagaactgtgcgccagttcatcagtcatgcctaacgcgcgcagcacgtaggatggctcaaggctcgccgaagtacaggctgaaccggaggaaaccgccaggtctttcagcgccataatcagcgactcgccttcaacatagttgaagctgacgttaagaatgttcggcgcgccctgctcgaggtcgccgttgaggtacacttcttccatatccttcacgccgttccacagacggttgcgcagcgtgcgcagacgcgccatctcgctttccatctcttctttggcgatacggtaagcttcacccatgccgacgatctggtgaacaggcagagtaccggaacgcataccgcgctcgtggccgccgccgtggatttgcgcttcgatacgaatacgcggcttacgacgcacgtacagcgcgccgatgcctttcggaccgtagattttgtgaccggagaaggacatcaggtcaactttcagctggctcagatcgataggcagcttgcccacgctctgggtggcgtctacgtggtaaatgataccgcgggcgcgacacatctcgccgatggtagcgatatcctgcaccacgccgatttcgttattcacatgcatgatggaaaccaggatggtgtcgtcacgcatcgctgcttccagctctttcagatcgataatcccgttgctctgcggcgccaggtaggtcacttcgaagccttcgcgctccagctgacggcaggtatccagaaccgctttatgctcggttttgctggtgatgatgtgcttgccttttttctgataaaagttggctgcacccttgatcgccaggttgtcggattcagtcgcaccagaggtaaagacgatttcgcgcgggtcggcgccgaccagctcggcaatctgattgcgggcgatatcaaccgcctcttcagcctgccagccaaaacggtgggaacgggaggccgggttaccaaaggtcccgtccatggtcaggaactgcatcattttctcggcaacacgcgggtccaccggcgtggttgcggagtaatcgaggtaaatcggtaatttcattgctcttaaactccgtacatcactcaatgcaaggaatcaggcaaccggcttgatgtacgaccgagtacacggaatgtcggagcatcccggcctgattctgaaagctctttataatcgttgtcccgccgtttcgcgccgccttgccctgtcagccgcagcccgaaacgggacgggtcactcaggcgcgcagtttaacgtcaatcgcgtcctgggtgcgcgcattgcgctgggtttcgtgctgatgctgacgaccggaaacatcgaggatctcctggttattcaccagttccccgagggtgatattgttcaggaagccggtcaggcgctcgctcaggtcgcgccacagcgcgtgagtcaggcatttatcgccgccctgacagccgcccttgccctggcaacgggtggcgtcaacggattcgtccacggcgctaatgacttcgccgacggcgatactgccggcatctttacctaacagataaccaccacctgggccacgaacgctggaaaccaggccatttttacgcaggcgagagaacagctgttccagataggaaagcgaaattccctgacgctctgaaatatctgccaacggcaccgggcccgtttcagagttgagcgcaacgtcaagcatcgcggtcacggcataacgccctttagatgtcagtctcatgtcttacttaacctcaaactcgcccctggccgggctttttattaatatgggtattgcatagcagggccaagtctgacattcccgagtaatttggtcaactatttacttgactgttttagtcaggtatttggctttccgtgccgttttacttccgcatagcctgataccttcatcccgccaggcgagcccgattcgttgcccggataagcgaaacgccatccggcgttaacgcagttacttacctttattctgctgctcaatagacgccagcatgccgcgcaggatgttcaactcctggctttccggacgcgcgcgggtgaacagacgacgcagcttgttcatcacctgccccggatgattcgggcggataaagcccgtcgccagcagcgtctgctcaagatggtcgtagaatcgctccagatcgtccaccagcgggtacggcgcctcttcatgctcaaccgccggctgcgcttgctcctgcgccgccagccaggccatccgcacttcataggcgataacctgcaccgccatcgccaggttcagcgagctgtactccgggttggcggcgatcgccacgtgatagtggcacttctgcagttcatcgttggtcagaccaacgcgctcgcggccaaagaccagcgccaccggcgcatgctgaccttcggcgacgcttttcagaccgcattcgcgcgggtcgagcatcggccacggcagcgtgcgggagcgcgcgctggtgccaaccaccaggctacagcctgccagcgcttcatcaagggtatcgacaatctgcgcgttgccgatcacgtcgctggcgcccgcggccagggctatcgcctgcgaatcgggtttgaccagcggattgaccagccacaggttagttaagcccatggttttcatcgcgcgggctacggagcccatgttgccggtatgggaagtttctaccagtacgattcgaatattttgcagcattatggttcttcggctaaagattattcgtgcatgctaccataaaacggagacataagcagatttggctgctattatatgcgccgttttttcccgttctttaacatccagtgagagagaccgatgcatccgatgctgaacatcgccgtgcgcgccgcgcgcaaggcgggtaatttaattgccaaacactacgaaacgccagacaccgtagaaaccagccagaaaggcagcaatgattttgtgaccaacgtcgataaagccgccgaagcgattattatcgaaaccattcgcaaatcttacccgcagcacaccattatcaccgaagaaagcggtgaacacgctggcgaagagcaggatgttcaatgggttatcgatccactggatggcaccaccaacttcgttaaacgtctgccgcacttctctgtttccatcgccgtacgcatcaaaggtcgtactgaagtcgcggtggtctacgatccgatgcgtaacgaactgtttaccgcgacccgcggccagggcgcgcagctgaacggctaccgtctgcgcggcagcaacgctcgcgacctcgacggcaccattatcgcgaccggcttcccgttcaaagcgaagcagcacgccaccacctacatgaatattctcggcaacatgtttaccgaatgtgccgacttccgtcgcaccggctctgccgcgctggatctggcctatgtggccgccggccgcgttgacggttactttgagatcgccctgaaaccatgggatttcgccgcaggcgaactgatcgcccgtgaagctggcgcgattgtctgcgacttcaccggcggtcataactatatgctgacgggcaacatcgttgccggtaacccgcgcgtggtgaaagcgatgctggcgaacatgcgcgagcagctgagcgacgcgctgaagcgttaatctcttactgatgtcaaaaaggaagccgcggcttcctttttttatgtcattttatcatgttgaggatctggcgaatcaccgcattaccgccaatacagagcaccgtcaggccgctaaataaggccagcggtccgcgccaacgcagacagccctgcgtccccagccagcgccggaaacacagcgctatccctaccaccgtcagcctggctaacagcacgccgaccatcgccggaaccagcagcagccatccccacagcggcagctcatactgctgcgcactgagtaaaatccataccagctgaaacggcagataaaaactcagggcaaagatcagcggaatgcgaatattgcctgccggtgcggcaacgccctgaaagtcgcgccagccgtcgcgcagcagtattccagccagcaccagcgtggccagatagcatacgtcgttaaagatgcccacgatctgcattagcctgtcgctgcttagcttacccataaacgcgaaacgccagaaaatgatcaccagaaaaccgaactgcaacacccagctgcgcaggatccagtcgaccatctcccgcggcgagggctggttatgcacagcccaggcaacaatgggcagtttactgtgaccgggatgacaaaaggccagcacgaagcccgacagcgttagggtggcgtaggccaccagcggaatatccgcgacactcgccaccccgaatcgcataacatacggcatggcgtggtagacacgcaccagatctgacggccaccagctggccagggctggaaaccagaatacgatcgccaggcccgccagcagcccggcggcgccggcgcagccataatagaaccgcccgctctgcgcgggagaaacgatatttgcggccatagcgactccttgtcatccgccgaaaagcggaaaactagagcatcgcttcgccagcggcaagcgctggcgcccactttaggatttgcgcccggcgtctgtctaaaacggacggatcccaccgccggcagggacggcgctgagccacatcacccctgccgccgccagcaatatgacgccgccggccagcgccagcgtcgcccaactaacctgcttccataacgctggcgcctgatggcgactgaggcggatcgccagttggcggaacccatgcaccaacagcgccagcgccgtgatagtcaacgaggttcccgccgccatcgccagcgccgccgccatcccccagccaaaaacgccgattaccttgctgaacagcagaaccatgatcgcccccgagcagggacgcatacccatcgacaggacgatcgcggcgcgagcccgccagtcgtcgccagcctgcagctgctccggggccgggagatgctgatgcccgcagccgcagtgttcgttatgaacatgatgcggagtaaaagcggtaaacgttggccggcgcagcagcagacgcagcttttttaacgcccgccagcacagcagcagccctaacgcgcccaccagcaaatagctccccttctccagccagaaactgctgaggtgcagctggcacgccggcagctgcagcagcgccagcaccacgaccaccagcgcgatggccaccagcccctgcagtaaagaagcggccagcgtcaggccaatgcttgatttcagcttcgcgggatgggtggcaagccaggtcgtaatgacaattttaccgtgtccgggccctaaggcatggagcaccccgtaaacgaagctaaaccccagcagcgacagccctgccgccgccgggttctccgccaccgcctgcagcaggcggctgagttccaggtttagcgaacgctgccagactgcgctctgcatcagcacctgcggccacgcccgccacagccagatgccgccgatgatgctcacagccagcaacagcgccagcggccacagcgctttccagcgcgaaaatcgcgcgcgcggagtaaaaattactgacatgtcagggtcaccttctgggcaaaatagctgcccagcgccatatcctccggcggcgcatccgctttatccagcgactgggcgtatgagagcattttgtcgttcggttttggcgtcatcaccgttgccttacaggcggcccgcagccctgcgggcagggaaaaatcgctatccttgtcataaaacatatcgacgtagtaggtcgggtcgaaggtggaaaaggtaaacgtctgcccggcaatgggttgcggcgtcgccagcggcagagtaaaggtgagtaccgcctgcagtccgtcacgttcgaggccgtaaccgtcgggacgattgtcaaatttaacccgctgaccgttatgccacagctcgctgaaatagtgctgaccgagcacgttggccatcacctccgccgccagctttttccagacttcgctgcccggtttggcgtttccggcatcatagagcagatccgatgaggtaatttcatccatcgtccagcgcattttaaaggcgctcagcagaccgtccttgaccaccggctcgctttgcaggctgatgaagctatgcggatgcgcagcggccgaccatgataaaaccatgaaaaacgccgcgcttgtgcattgtttcactctgttcatctgttcctcacgtgaaaaattctgtgaacttcgccagcaatcctgagtaaaagcggacgctcttccctgcccacgccgcggtcattgtctatccttagcggaaaccctaactggaacttaccagatgatgaccgtcattgaaccaccatctgcgctttccagtccacagcgccgtagccaggtgctcctgatgttttatctgcccggacagtcggtgacgactgaacggcttggcaggatcaacctcgttgatgagaccacggcccggcaggatattgaggagaccggacgcgaaattcagcgttaccaccgtttgaccctccagtcacaggtggacggcagctatcggattgaaggcgccgcgctcgaccaacgtttatgtctgctgcatgcgctgcggcgggggctgcgcctctgcccacagttcgttaatcatcattttaccccggcgctgaaaacgcagcttaaacaggaaggcattgcccgcaccttatacgatgataccaatctgcaggcgctggtgaaccgctgcgcgcgggcgctcaatcgccagtttgactgccgcgacgtgcagtttctgcgcttgtacctgcagtactgtctgctcgaacatcaccggggatactctccggacttcaatgaggaacagcaacgctgggctcaaaccgccgccgagttcaccctggcgcaggagattgtccgccactggcagcgtcgggtcggcgctccgccccatgtcggagaaccttttttcctctcgctgctgtttatgttgctcaaaacccccgacccggtccgcgacggtcacccgcacgatcgccgcctgcggctggctatctccggcctgatccaccgcttccagatcctcgctggcagagcgttcagtgatgagcaggggctcagcgatcaactctatattcatttgtcgcaggcgttgatccgcagcgtgtttgctatcggcatcgacagcacgctcacagaggaagtgacccggctctaccctcgcttactgcgtaccacccaggcggcattgagcgaattcgaggaggcctggcacatccgttttaatgaggaagagaccggtttaatcgcggtgatctttggcgcctggctgatgcagaaaagcgacctgcacgagaaacaggtgctgttgctaaccgatgacaacccagctattgaagaggccctggaacaacagctgcgcgaactaacgctgctgccgctgaatatcaaataccagagcgtagagcgctttcagaaggaaggtgcgcccaaaggggtgacgcttatcgtcaccccctatgcgacggcgctgccgctgttttcgccgccgctgatccacgcggagaactacttcactgaacgccagcagcagcatatctgcgccatgctcgaggactaggccgccaccgcttttggccgtatagccatcgccgggagcgtcagcagggccatcacccagaatacgccctggtgcaggtgctgatagaggaaaccggcgaagacggtcatgatggcaatactgccgcccatcgccaccgcggagtagacggcctgcagacggatcacttcgctaccctgacgggcggcgatatagcgcatcgccgccagatgacacaccgtgaaggtgccacagtgaaggatctgcgcaaggatgagtcccggcagcgccgtggtccagcccatcagtccccagcgaatcagcccgcagacggcggagagcaagagcaggtcgcgggcgctgaagcggcggaacacctttttactcaacgcgaagatcaccacttccgccaccacgcctaacgaccatagataaccgaccgccgaggcggaatagccggcctgctgccagtagatggcactaaagccatagtaggcggcatgcgctccctgcagcagacaaacgcaggcgagaaagcgccagctttggcgcaccagcgtcagccaggccgccattccggccccctgctgctggcgcgactccccctggggcatcaccgacggcttaagcagcatgccgagcagcatcgaggcgacccccaggcttagcatcagcaggatcgcccggtaatcgaacaggctcaccagcttgccggtcagcgccgaaccaatcacaaaggcaatagatccccacagccgcacccggccatagtccatggtgatctgcttttgccaggtattggccagagcatccgtcagcggcaccagcggcgaaaagaacaggttgaagccgatgatgatcgccagcagccatgctacgtggctgccggcccagaaggccagcgcgaagagcaaggttaacagcgccagcacgcgcagcgcggtgatcagccgggagggatcgctcacccgcggggcaatcagcagactgccgagaaaacgggccaccagaccggcgccaagcaaaatgccgatggtttccggagtcagcccgtttccggccagccagacgctccagaagggcagaaaaataccgtagctaaaaaagtaggtgaaataactgagcgccagccagcgcgtggagtgcaagaccatgatttcctcccgaatggtggcgatagtctggcgataaaccccggcgggcgcaagatgctcttgtctgctgatagctcgttatttatgctccctcgatgatgattttcagcgaaaaattcagcttctctcccgcgcctaaaactcgcagccccggctgcccatccatgttgtgggcgtttaccggatggctttgcggctcgaggcaaaggaatgattcaccttgcattctgaacagcatcaaccacggagtttgcgatagaattgtgatattcatcacgtcattacttaccttcgcccgcccgccccagccggaataacccacgttcagccaacgatcttcaccgaactgagccacgctgaaattggcatagtcgggcaagtttccttgccagttgagaggtaaatgattctccccttccggccagtaaccgctgacctggaactgaaccttgctgcgttcatcgaaagggaaaaagggatgaaagccgcagccgtaaagcgcagggacctccccatagtgggtaagcgttagctccgctatcagctggttacgcagcaactggtagcggagctgcgccagataatcgaaaccgcaggcatgctgccgacgcagctgtaatacacaatactcggcgccgcactcaataatatcccagcgctgtaaccagccgtcaccgtgaagaaagaaatactcgtcggcatggtggcgaggcaggacaatctcctgcccatgaaaaataaaacggttgccggcgacgcgattggccaatggcagcatcggaaacatgccgccggcgggattttcatatagcaccggcgcttgatattgccgcgagaataaactttgcactttgccgcccagagaagagacgcacatccgcagatgcgcgttctccagaatccactcttccgccattagcgcatctgctcctgcttcgccgcattaacgcccgtatgacgctgcgccagctgctcttccagcgcttcgagggtgatacctttcgtttccgggacgttgcgcaggatatagaggtagccggcagcgcaaatgacaccatacagcaggaagcttcctgccgcgcccagaccggcattaagcagcgggaaagtataggttaacaggaaacaggcgatccacagcgccagggtacctaaagacatcgcgagtccacgtacgcggttgggaaaaatctccgccagcagcacccaggtcaccggcgccagggtcaacgcataaatagcaatcgccgccagcaccagcaacagtaccggccaccccataatgcccatggcgtaagcgccggcgatcagcacatagatcagcgtcaatcccgaagcgccaagcagcattaatttacggcgaccgattttatccaccagcggcagcgccgcaatggtaaagaccagattaacgacgcccgtcgcgacgatcgatttcagcgtgctgttaatatcgaaccccgccgaggcaaaaatctcctgcgcgtagttaaagatgacgttaatcccacaccactgctggaatatggcgagcaccatgccaatgatcacaatcggtttcacctggggagccaacagcgcgccataggagactttattgttatccttttccagggtatgcgcgatttcacgcaggatcctgtcggcatagtcggcagaaccaatgcgttccagcgcagcccgggcgcgctccggtttaccggccttcatgagccagcgcggcgactcggggacaaaaaacatcaggaccagaaacgccagcgccggcaccagttccgcaccgaacatccagcgccagcccatctgcccattccagctgtccacaatcatctgctgcgtcgcccccggctccaccggttcagcaatcatcagattgattaactgagcggccagtacgccaatcacgatggtgagctgattgaccgcgacaaaacgccctcttttctctgccggactgacttcggcaatgtaaagcgggctgagagcggaagccagaccaatccctacgccgcccacaatgcggtaaaccacaaacatatcgaaatgactggcgaccgccgtcccccaggccgacgcgctgaacagcacggcggaaagaattaatggcagcttgcgccccagtttgtctgcgcaccatcccgaaattaatgcgccgaaaatacagcccaacagcgctgagctcatcgcccagccggactgcgccgggtccgtaattgaaaaccaggcttcataaaatggcttagcgccgccaatcaccacccagtcatagccaaacagtaaaccaccgcaggcggcgaccagacaaatcgtccagacgtagcccattttcagatgtgtctgcgcgttgttcataatgattcctctataagggaaacgcagggaacagtagggttcaggcgggccgagcccgcccattgaggttcaggaaaaaatgccgctttgcagggcatggcgaatcagatgcgccttatcatgagccggatttatttgcagaagctgctgcatcctctgctggcaggcggatacgttgcccagccccagatggcccaacgcttcaataaacaagcagtgctgctgatgtctctgctgcgctgatacatcgagaaccaccaggtccggaagagagacggcaaaaaaatcgacttgcggaacgtcatcccgatgctgcgcggcccagtcgataaaatggcggaagtactgctcggcctgcgctgggttaccgctcttacgcagcgcaatgccctgccagaaaagataatcggcgggttgatcgttgtagtaccgcccggcgtccagcgttgagcccccttgccgggcaagctggtaatattccgccgcctgctgcgcatccccagcctgttctgcgcagtagcccagcaaataccagatatcgttatccgtttgcccaagcagtcgcccctcccccagattgtcgggatagcgtaatgcggctttcagacagtccgtggcctgtttaaacgccccacgctcgatgaactgtaatgcccgatggagctgattgagcaaatactggccggtgattttcccttctcctccttcccagggatggaatacgcgcgtatccagaatcgcggcggcatcggcataatgaccggacgcgttccacaggcttagcagctcagcggtcaggtcgtcccgcttcagcaccacggctttacgttccaccagcgtcgtcagtcgctcatgtaccgacctggccagtaatttttgcaaaaaatcgagttcaaacaggaagcgcgcattttccggctccagcgctacggcgcgctgcagataagccagcgcctgcgttgcatcctgctgtttattccacgagtaaacgcccagcagacgatgagcgggcgcataatcgggagatttttcgagcgtctcgcgccagcagctcaccgcctcgtcatagcgacgtttgctgtaccagaagcaaccgagtagatagcgggcaaaagcgctgtcgcccagcgactgcagcatctgaacttcatcgagcgagttagggaaacgaacattgtgcgcatggcagtgctcggcggcggcaataaactgttggcgttcattggcatcatcacttagcgacgcacgccagagcatcggcagcgcttcctgactgtccagaaccgcaagaacctctttcaccgccgacgtctgtccgatagagagcagccaacccgccagcaggctggcgttgacccctctgcgccccgtgatgcgcagcagggtttctcgcgcgtcgtcgctccgctcaatcatccagcgcgcgcagtgcagcggatagctcaatgggtattgttcaagagaggcgaaaataaactccagcgctgctttcttctgcccactgttggctaatgccagcgttttcaaccccatcgccagaggattgctggcgttgaaccgcagactggtgtttactttttccagcgcatcggcaacatcaccgcgcttcatcgccagccgcgccagcgaccaccaggcggcgtcacggcaattaccgctccaggaggctttgtaatagtgatcccaggcgcctgcatcatcccccatcctttccagcacgctggcaagcagcatactggcttcgccatctcgcgggttcttattcaaacgatgcgcgcgctgtagcgcagcacgggcacactgttccgccagcgcccagtcggcactgttgaacgccagggtaccgagggcaacattattgcgataatcctgcggatcgagctcaaccgcccgacgatagtaatccccggcgtagcggcttgcgtggttgtattgttcaaggtgctggccgataaaatagagctcgtcgccattgtggatcgcttccggtaacgcgggcgctatagctggttcgggcagcggcgtctgttgggtaatatgttcctgataatccagcagcggctggttctcggcggttttcactttgagggttaagcgcccgacgccattttccggcagcgtctgctgccagctctcaccgggcttcagcgtcagctgagtttcgtacaatggctgatggtcagcgctgagttcaaccacgatatgatttagcggagcaatggcatatacgccaagctgcagttgcccagactcgcgaaccagcttcagtgccagctgtgtattggcattttgcaccatccctaactcgctgtagggaaggaaattttgcacaaacaccttctcttcataaggcgcaagccacgtaaagtcaggctggttatcggtgaagacgccggtcatcagctcaatataagggccattttcatcagtcagatttcgatcccaggcctggccaaaatccccgtacccccagctccactgtttcttgccaggagagacatggtgatcggcaacatgcagtaacccgcctcgctcgtcatgatgataagcgccgacaaaatcgtaatccgacttctccgccatatacgaagtgggtaccgggacgtttttataacgggagatatcaacccccgcagaatagtccactttgtagtagataccggtggcaatcgggaaagcggaaacatcacgcttaccatggtcgaatacagcggtgacatcgggtgggaatacactctggtgggcatcgccgccttttactgcagggttggcccaccacaggaaatggcgcggcgtggcgttaccattgaagatcttgccagtgatttcaatcagcgcgcggtcaggatagagcgtaaacccggccataacctgcaaaccgcgcatgggctccgcttcccccatccatacggtctgcgcgccgttttctccctgctgaatagaaaaatcgaccggcttaaaggtcgtcggccggtgatgttgcggccagttaaattcgattccgccggagatccagggcccgagcagccctaccagggctggcttaaccacctcattgtaatagacgaaatcacgttgtttgactttatcatatgcccggtgaatacggccgccaagctccggtagcagcatgacccgaaggaaatcattctccatccacactgcctgataatcgcgcatttcgcgttcgccggtcagggtatcaatcacgccgtagggatagacgctgccggaagatccttgataaacacgtttttccagaaacatagggttcggatcttccgctcccgtcgtccacgttggtaatgaaatgatttcctgccagaccttaaccgaaccgtacatgatgcctccactaaacaaaacgaagtaaaagttgcaataacaggagtctatatcgccaattcgctgttaaaatgcgcaatgctcacgcaatatagttaagggagttaagtgtatgcagcgtactggctttgataacgcccgggtccggcaggccaataagtcgatttttctttcccatctgtggcgggaaaagcagctcagtaaatcacagctctctcaactcaccggtctctccattccggcggtgagcaatattctggccgagctgcttagcgagggattgatcggtcactcaacggaacacttgagcaaacggggcgtgaacagcggcagctaccagatccccgagcacggcgcctggacactgtgcatgaatatcaccccgaccagcattgaatatcagcttgccgacgcccgcctgctggcagtggatggtcatcagcatttgccggtcaacgcgcccactcctcaggccctgcttgaggccatcgttgaatgctggcggcatatccaccgccgctacccgcagcacagcatcaatctcgcccttggcgtgcatggacaggttgatccgattaccggcgtttcacaaaccatgccccaggcacgctggaaaacaccgatcgaaataaagtatctgcttgaggagcggcttggcgtgcaggttcgggtggataacgactgcgtgatgctggcgctggcggagaagtggcagcatcagggtacacagcaggatttttgcgtgatcaacgtcgactacggtatcggctcgtcatttgtgattaacgatcatatttatcgcggcagtctgtacggcagcgggcagattgggcatacgattgtcaatcctgacggcaaagcctgcgactgcggaagatacggttgcctcgaaaccgtcgcctctctcagcgcgctgaaaaaacaggcccgaatgtggctcaaaacgcagcctgaagcaacgctctcccctgagcagttaaccacggcgtcgctcattgaggcctggaaagagggagatgtgcaaattcgcgcatgggttgataacgctgccaacgcgattggcttaagcctctataatttcctgaatatattaaatattaatcaaatatggctttacgggcgcagctgcgccttcggtgagcagtggctggaaagtatcgtcaaacaaacgggtttcaacccctttgaccaccgggatacgccgcgagcgcacgccacccaaattggctttggccagctgacacgcgcccagcagctgatggggataggttatctgtacgttgaggagcaattgcagacgctggtttagtcataaacgaacgtggcggagcgcaaatttgtgtattacgtttaaatcacacgtctctcataacgagctgattatgaacacactccgctattttgattttggcgcttcccgctctctgttgctgcttatcgcccgcatcgccgtggtgattctgtttattctttttggctaccccaaactgctgggctttgacggtacggtgcagtacatggccgcctccggcgcgccgatgccgaccctggcggcgattatcgccgtcattatggaagtgcctgccgcgattctgattgtgctcggctttttcacccgcccgctggcggtcatctttattttctacaccctgggcacggcggtgattggccatcactactgggatatgactggcgatgcggtattgccgaacatgattaacttctggaaaaacgtcagtatcgccggcgctttcctgctgctggcggtaaccggccccggggcgatctccctcgaccgccgctaatctccagacgcaaaaaaggccgcatacgcggcctttttgatgtcaacgctaacgcttacgcatataccgggaagcgggcgcagatatccagcactttacctttcacgcgctcaatgaccgcgtcgtcattgatattgtccagcacgtcacacatccagccagccagctctttgacttccgcttctttaaagccgcggcgagtcactgccggagaaccgatacggataccggaggttacgaacgggctcttcggatcgttcggcacgctgtttttgttgacggtgatgttggcgcggcccagagcggcgtcagcttctttaccggtcaggtttttatccaccagatccagcaggaacaggtggttctcagtaccgccagacaccactttgtagccgcggttcaggaacacttccaccatcgctttagcgtttttcgcaacctgctgctggtaaactttaaactctggctccatcgcttctttcagcgccaccgctttcgccgcgataacgtgcatcagcgggccgccctgcgcgcttgggaacacggcagagttcagttttttgtacagctcttcgctaccgcctttcgccagaatcaggccgccgcgcggacccgccagggttttgtgagtggtggtggtcacaacgtgagcatgcggaaccgggttcgggtacacgccagcggcaatcaggcctgccacgtgcgccatatcgacgaacaggtaagcgccgatgctgtcagcgatttcacgcattttcgcccagtcaacgataccggagtaagcggagaaaccaccgatgatcatcttcggtttgtgttcctgagcctgcttcgccatgtcgtcatagtcaattttaccggactcatcaataccgtaagggatgatgttgtacagtttgccggagaagttaaccggggagccgtgagtcaggtggccgccctgcgccaggttcataccgagcacggtgtcgcccggctgcagcagcgcggtgtagacggcaaagttagcctgggagccggagtgcggctggacgttagcatagtcagcgccgaacagttctttcgcgcggtcgattgccagctgttcaaccacgtcgacgtattcacagccgccgtagtaacgcttgcccggatacccttcagcatatttgttggtcagctgagagccctgcgcctgcataacgcgcggactggtgtagttttcggaggcgatcagttcgatgtgctcttcctgacgtactttttcctgctccatagcctgccacagttcggcatcataatcggcaatgttcatttcacgctttaacatccgcatctcctgactcagctaacaataaaatttcggcctaaaaaggcggtccgattggacaacggcccacagtataaccgaatcattctgtgataacaggtcttgacaaaggattttacgcaaacgattggctccgcatgacacaaggctttgagcaataacgcctctctcagtatcaacggatttcttttcaggtttgtgatgcaaattcttcatgttgtaactggatcgggggaatgtgttaaagaaccatttacaacgcagggttatttctttaagatgcatttaaaatgcatcattaagataacacataaggaagcacgctatgcttgacgctcaaaccatcgccacggtaaaagccaccattcccctgctggtagagaccggcccgaaattaaccgcccatttctacgatcgtatgttcgcgcataatccggagctcaaagagatcttcaacatgagcaaccagcgcaacggcgatcagcgtgaagcgttattcaacgctattgccgcctacgccagcaatatcgataacctgcctgccctgctgccggcggtggaaaagatcgcccagaaacacaccagcttccagatcaaaccggagcagtacaatattgttggcagccatctgctggcgaccctcgatgaaatgttcagtccgggccaggaagtgctcgatgcctggggtaaagcctacggcgtgctggcgaacgtctttatcggccgtgaagccgagatctatcagcaaaacgccagtaaaaccggcggctgggaagggacccgcgcgttccgcatcgtgaagaaaaccccgcgcagccagcttatcaccagctttgagctcgaaccggttgatggccagccggtcgccgattaccagcctggccagtacctggccatctggctgaaaccggaaggcttcgaatatcaggaaatccgccagtactccctgacccgcaaagcggacggcaaaggctaccgcattgcggttaaacgcgaggaaggcggtcaggtttccagctggctgcataaccatgccagcgaaggcgatgtggtctatctggccgccccggcgggagatttcttccttaacgttaagccgcagacgccggtcactctgctctctggcggcgtcgggcaaacgccgatgctggcgatgctggatgcgctggcgaagagcggtcatcagggtcaggtgaactggttccatgcggcggaaaatggcgacgttcacgcctttgccgatgaagtgaaggcgctcggcgcggcgctgccggcgtttacctctcacgtctggtatcgcaccccgactgaggccgaccgtcaggctggacgttttgatagcgaaggtttgatggatttagcagcagtggcggacaatattcgcgacccgcagatgcagtattatctctgcggcccggtagcgtttatgcagtttgcagcgaagcagctggtcgaattagggatcaacaaagacaacattcattacgaatgcttcggcccgcataaggtgctgtaagccccgacgcgcggggatttgtaggccgggtaagcgcagcgccacccggcaatactgcagcgagcggcgagcgttaaatcgccgcgtcgtcttcttcgccggtacgaatacgaatgacccgcgccacgtcgaagacaaagattttaccgtcgccgattttaccggtctgtgcggtacggatgatggtatccacacaggtatcgacgatatcgtcggtcactacaatttcaatttttactttcggcagaaaatcgaccatatactcggcaccacggtacagttcggtgtgccctttctggcggccaaagcctttcacttccgttaccgtcatcccggtgatgccgacttcggccagcgcttcacgcacgtcatccagtttgaaaggtttaataatcgcatcaatctttttcatggggttcctgtcttaatcgcgtaaccggttgcttaccgtatcataacttgcgctatagtgcggagctactctttaaagtcgttggcgtcgagctcatggcgcgacagcagcttatagaattcggtgcggttgcgccctgccatccgcgcggcgtgagtgacgttgcccttggtaatttgcagcagcttgcgcaggtagttcagctcaaactgattgcgcgcctccacgaaggtcggcagcgccgtgttctcgccctccagcgcttgctcaaccagcgcgtcgccgatcactggcgacgaagtcagggccacgcactgctcgatcacgttcaccagctggcgcacgttgcccggccacttggcggccatcagccgcttcatcgcatcgctggaaaacgcccgcacgaacggcttatggcgatcggcggactgacgcagcagatggttggccaacagcggaatatcttccgtgcgttcggagagcggcggtattttcaggttcactacgttgaggcggtagaacaggtcttcacgaaactcgccgcgggccatcgccttcggcaggtcgcggtgggtggcggagataatccgcacgttgatttcgatatcgcggttgctgcccagcgggcgcaccttgcgctcctgcaggacgcgcagcagcttcacctgcaacgcaaccggcatatcaccgatctcgtcgagaaacagcgtaccaccctcagcggcctggaataatccttcacggttactgaccgcgccggtaaaagcgccccgcgcatggccaaacagttcggattcgagcagctgttccggcagcgcgccgcagttgatcgccacgaacggcttatcatgacgcgggctggcgttgtggatcgcctgggcgacgatctccttcccggtcccgctctggccattaatcagtacgctgacatccgattgcgccaccattccggcctgctcaagcaggcgcagcatcagcgggctgcgggttacaatcgcctggcgccaggcttcgtcggtggccggcgagcgctgctccaacgcctcatcaatggctttatataaggcatctttatcgaccggcttggtcaggaagctgaacaccccctgctgggtagccgccacggcgtcgggaatcgaaccgtgagcggtgagaatgatcaccggcatgccggggtggcccttctggatctcgctaaacagctgcaggccgtccatttcatccatccgcagatcgctaatcaccagatccactttctcacgccccagcacgcgcagcgcttccggcccgctctcggcggtgaccacgctgtagccttcgctgaccaggcgcatgcccagtagcttcaacagtcccggatcgtcatccaccagcagtaaacgcgccggtttacggatcgtcatggatcacctccggcactttttcgctgccgaaattgccgcccggcttgcggctggagagctggcgttcgatatccgtcaggttctccagcttgcgggtggtcagctccagctgctcgcgcagcgccagctcctgctgacgcagtgtctccagttcgctatcgctggactgctgaagcttagcgtaacgggcacgctcttccaccagctgcagctgacgggtctggccgtcgcgccagagctgatacagcgggcggacctgaacggcgatttgcgggctgaaggtatcgagacgcgccaccaggtcgcggcgctcctcaggggtaattttagcatcagcaagcaggatgccgcgacggaacgcgtcctgccagctgtcgtcggtatggcgtttcgcctccgcccgcgcctgcgccggcgcgaggcgatcggcacagtcaatgccccgcagccagtagaggggatttttgtcgctggcatcgctgctgtgcgcccagatatccgcgcagtctaccgcgacaaaatcggccacctgatgctgcgcctgcccgggggcggcggtaccttccgcggtatgcggtgaaaagccggcggaacaccccgccagcgtcagacaagcaatgcctgaaagcagccatccgctgagggaacggcgccaggccaggaattgggacatagttccccgatatcgattcataagttggattattccggcgctgagggaagcgtaatgcgaaaacagacctgcccggcgggcgcatcaactaagctgagctccccttgcatctgccggacgcagtcgcgggcgatactcaaccccagtccactgcccttaacggcccctttacgctggtgactcccctggtaaaaaggctcgaatatcatgtttttttccgcggccgggatcggttcgccgctgttggcgacatcaatacgcacctgctctccgtgccggtagctatggatacggatgttaccggattcagcgccatagtgcaccgcattggagtagagattatccattacgcttatcaatagcgcaggctctgccaggcaacgccgcgcctgcagcgtcagttcggtatgcatcagtttagcccgcgcgggcaggctgtgcgccgccacgacgttttccaccaggtccaccaggtccaccgcttcgcgagccaccgggccgtcggcctgttttcggttatagtccagcagctgttcaatcagcttttgcaggttacggctactgctgtcgaggatctcgacgatctcctgctgctcaggggtcaggggccccgcgacgcggtcggccaacagctcggtaccttcacgcatactggccaacggggttttcagctcatgcgacagatggcgaagaaattgatgccgctgcgactccagccacgccaggcgctcgctgagccagatgatgcgcttgcccaccgatcgcagctcgcgcgggccggtaaacaatgcggcgtcgtccagcgacttccctgcccccagctgattgatcattctttcgatgcctttcaccgggccgataatcatgcgggtgaagagtagcaccagcgccaggctcagcagaaacagcaccagcgcctgccagccaaaaaactggccgcgttcggctatctcctgctgcagctgttggccacgagaatagacgaccgcccgggtcgcctgcaccatatcgctgttattactggcgaaaacttccagtctggcggctgcctgggcatcgggtccgctatttttacactgcagctgcgccagatcgctgacatcctgacgcagcgcctgccagagcttctcatccggcagcacgccggcgtgggcgtccagcatctggctgtagcgctgccgctggttttgatagacgcgcgccagcgtcggatcgtccagcacgcagtactggcgatagctgcgctccatctccagtgcggcattgatcatctcctcgctgcgtcgggcgtcgaccagggtggtacggttaatatgcgccgcctgggcgctaagggcgttcaggctctgccaggcctgccaggccagcaccagcaatggcagcaggatcagcacaaaagagagcgtcaccagctgacgcagcgaacgggggaaaagagagagtcgcttcaaggatgtagtctcaatcattagctctggtcgatgctaactgaggagcgcgccggagaaaagcgctaccgctggttactgcgccgcagaaacaacaaagccaggcgcaaggcctggctttgttcaggaatgaggcggtgccttactcgacgtttcgcccgatgtctgataaagccaggctgttatcaggagttggacggcaggcacctgtttgtgcgtcattcgaagtttatgtagcgcgtcccgaaggggctgacataagaaggtgaatgagccactggttaatattatgcatgaactatgccagctctcaaaacattttattaacatactgatatatatgacattaaccgcaagaacagtcgaactacctctgtttatttttcacccgcgttgtcgctatttagcgacaccaaataggctaccgattactcatcatttaaatcaataacttaagtgtcgcctattgacgacactgcaatatcgcagttgtcggcaattcccgacaccctggcgtgccgaccatcacagataaaaaaaagccccctgtcaggcagggggctgatacgttcgcgtgaagcgcggcgggaagattaacccagctgtttacgcgcgttacggaagatacgcatccacgggctatcctcgccccagttctccgggtgccaggagttgcttacggtgcggaagacgcgttccgggtgcggcatcatgatggtcgcgcgcccgctttcgctggtcaccgcggtgataccgttcggggaaccgttcgggttcgccggataggtttcggtcactttgccgaagttatccacgaagcgcagcgccaccagacctttgctctcaagctgagccagatgcgcgctgtcgcgcacttccacctgaccttcgccgtgggagaccgcaatcggcatccgtgagccaaccatgccttccagcagcagggatgggctttgcgtcacttccaccaggctaaagcgcgcttcaaagcggtcagactggttgcgcacaaagcgcggccacaggtcgctgcccgggatcagctcgcgcaggttggacatcatctgacagccgttgcacacgccgagcgccagcgtctgcggacgatggaagaaggtcgcgaactcatcgcgcacgcgctcgttgaacagaatcgacttcgcccagccctcgcccgcgcccaacacgtcgccgtaggagaagccgccgcaggctaccagggcatggaaatcgcccagaccggtccggccggccagcaggtcgctcatatgcacgtcgatggcgtcaaagccggcacgatggaaggcggccgccatttcaacgtgggagttcaccccctgctcgcgcaggacggccactttcggccgcgcgccggtggcaatgtacggggcggcgacgtcgtcgttaatatcaaacgagagcttcacattgaggcccgggtcggcatcattggctttcgcctcatgctcctgatcggcgcaggccgggttgtcgcgcagacgctgcatctgccaggtggtttccgcccaccacatgcgcagcgtggtgcggctttcgctgaacaccgtctgaccgccggcggtcagcacgaagcgatcgccctcaaccgctttaccgaggtaatgcacgcagtccgccaggccgttaaccgccagaatggcttccaccgcctcacggtctgcggcgcggacctgaatcaccgcccccagctcttcgttgaacagcgcggccagatggtcgtcgcccagcgcggcgatatccgcttccacgccgcagtggccggtaaaggccatttccgccagcgtgaccagcagaccgccgtcggagcggtcgtggtaggccagcagtttacgctgcgccaccagggcctgcatcgcattccagaagcctttcagttgcgcgacatcgcgcacgtcagccggcttgtcgccgagctggcgatagacctgcgccagcgccgtcgcgcccagcgcgttgtgccctttaccgaggtcgatcagcagcagggcgttatcttccgtcgaaagctgcggcgtgacggtatgacggacatcttcgacacgggcgaaggcagagatgaccagcgacagcggggaggtcatctcgcgctgctcgctgccttcctgccagcgggttttcatcgacatcgagtctttaccgaccggaatggtcaggcccagcgccgggcacagctcttcgcccaccgctttcaccgcctcatacaggccagcgtcttcacccgggtggccggcggcggccatccagttagccgacagcttcacgcggttcagctcgccaatctgcgtggcggcgatgttggtcagcgcttcaccgaccgccagacggccagaggccgcgaagtccagcagggcgaccggggcgcgctcgcccatcgccatcgcttcgccatagtagctgtcgaggctggcggtggtcaccgcgcagttggccaccgggatctgccacgggccaaccatctggtcgcgggcgaccataccggtcacggtgcggtcgccgatggtgacgaggaaggttttctcggccaccgtcggcagatgcagaacgcggttaaccgcatcggcaagggtaatcggttggcgatccagcgcgctaccctgagctttcagagtctgcacgtcgcgggtcattttcggcgttttgccgagcaggacgtccagcggcaggtcgatcggctgatcgttaaagtggctgtcgctcaggctcagatgctgctcagcggtggcttcgccgataacggcataaggcgcgcgctcgcggcggcacagttcgtcgaacagcggcagctgctccggggcgaccgccagaacataacgctcctgcgattcgttacaccagatctccagcggactcatccctggctcatcgctgagaatatcgcgcagctggaatttaccgccgcggccgccgtcgctcaccagctccggcatggcgttggagagaccgccggcgccaacgtcgtggataaagaggatcgggttggcgtcgcccaactgccagcagcggtcgatcacttcctgacagcggcgctccatttccgggttgtcacgctgtacggaggcgaaatcgagatcggcatcggactggccggaggccatagaagacgccgcgccgccgccgaggccgatgttcatcgccgggccgcccagcacgatcagcttcgcgccgacggtaatctcgcccttctgcacgtgctcaccgcggatgttgccgataccgccggccagcatgatcggtttgtggtagccacgcagctcttcgccattgtggctggtgactttctcttcataggtgcggaagtagccgttcagcgccggacgaccaaattcgttgttaaacgccgcgccgcccagcgggccttcggtcatgatgtccagggcggtgacaatgcgatccggtttaccgaaatcttcttcccacggctgttcgaagcccgggatacgcaggttggaaaccgagaagcccaccaggcccgctttcggcttcgcgccgcggccggtggcgccttcatcgcggatttcgccgccggagccggttgccgcgcccggccatggagagatggccgtcgggtggttatgggtttccaccttcatcagaatgtgcgccggctcctgatggaagtcgtagcgcccggtctgatggtcggcgaaatagcgcccgacttcagacccttccatcaccgcggcattatctttataggccgacagcacgtagtccggcgttttttcaaaggtgtttttgatcattttgaacagcgacttcggctgctgttcgccgtcgatgatccagtcggcgttgaaaatcttgtggcgacagtgctctgagttcgcctgggcgaacatatacagctcgatatcgttcgggttgcgtcccaggcgggtaaacgcgtcctgcaggtagtcaatttcgtcgtcggccagcgccagacccagacggaggttggcgtcaatcagcgcctgacgcccttcgcccagcaggtcgacgctggtgaccggcgtcggctgatggtgagcgaacagcttctcgcccgcttccagctcgtcgaagacgctctccatcatgcggtcgtgcagctccgccgccaccgcggcccactgcgcttcggtcagggttgaggcttcaacgtaatacgccacgccgcgctcaagacgcacaacctgcgccagaccgcagttgtgagcgatatcggtagctttagaagaccagggagagatggtgccagggcgaggggtcacgagcagtaatttaccggtcggggtatggctgctcaagctcgggccatactgaagcagtcgcgccaggcgctcgcgatcgtcagcgctcagcggggcattcagatcggcaaaatgaatatattcggcatatatggcgcttaccggaaggttggccgcctgaaatcgtgccagcagtttattaatacggaatgccgacagtgcaggtgaaccacgcaaaatttccatcataagtctctcgtcttcgaagctttcagggtgagccagggggggaaacgggcgtcattatagtgaatcctgcgccccgacgaaaccgtttgcgtagaaataaaatcattgatgctgtttatcaataaatgtgacgaccatcgcgaataagttgccaactggcgcattattaagcagaatgccgcacattcgacgacaaccttgcgttttttccggacatcgcctgctgaggaacctgaagctgcagaagattaactctctgaaaaaattaaagattaattatctgctgatcggcattgtcacccttttgctggcggcggccctgtggccgtcgatcccctggtctggtaaacccgagaaccgggtggcgggcattatcgctcgcggcgagctgcgcatcagcaccatcaactcgccaatgaccttcgccaccatgaacaataaagcgttcggtctggattatgaactggcgaagcagtttgccgactaccttggcgtcacgcttaagataaccgtccggcaaaacatcagccagctgtttgacgacctcgacgacggtcaggccgatatgctggccgccggactggtctataaccaggagcgagtgaaaaactatcaggccggccccacctactattctgtttcacaacagctggtctaccgcgtcggcaatacccggccgcgcaccctcgcggcgctgaccgccgagcagctcactatcgctccgggccacgtggcgatcaacgacctgcagaccttaaaagccgagaaatacccggatcttgcctggcgcgtggacgaaaaacgcggtaccacggcgctgatgcaggcggtgattgacggtaaacttgattacaccatcgccgactcggtggccgtcagcctgtttcagcgcgtccatccggagctggcggtggccctcgatatcactgacgaacagccggtcacctggtttagtgcccgggacgacgataattcgctgtcggcggcaatgcttgatttcttcaataacattaatgaagacgggacgctggcgcgcctggaggagaaatacctcggccacggcaacgatttcgattatgtcgatacccgcaccttcctgcgcgcggtggaaaatattcttccggaggtgcagccgctgtttgaaaaatacgcccgcgagattgactggcgcctgctggccgccatcgcctggcaggaatcccactgggatccgcaggccacctcccctaccggcgtgcgcggtatgatgatgctcacacgcaatacggcgcaaagcctgggtctaaccgaccgcaccgatgcggcgcagagtatcgacggcggcatgcgctacctgcaggatatgatggataaagtgccggattcgatcccgaaagatgaacgcatctggtttgcgctggccgcttataatatgggttatgcccatatgctggacgccatggcgctcacccgcaaacagaaaggcaatcctaacagctgggcggacgttaagctgcgtttaccgttgctgagccagaaaccctattacagcaaactaaaatacggctatgcccgcggccatgaggcctacgcctatgtggaaaacatccgcaaatatcagataagccttgtcggctatttgtcagagaaggagcgccagcagcagcaaacgctggccctggcggaggattacccggccgtgctccccaatgagctcgaagagccgcaggagaccaccctgccctttttcaagtttcgcgccgataagcagatggataatgcccggatgaaactccccggccacctgtattaactttccccagtctgcgcccgggctttcttcagcgcttttttctcttcccgccgccagcggaagaagtcgctcagcatggcagagcaggactctgccagcacgccttcgctaatctcaacccgatggttcattcccgggtggtgcagaacatccatcagcgagccggcggcgccggtcttggcatccctggcgccaaacaccaggcgggcgatacggctgtgcaccatcgcgcccgcgcacatgacgcagggctcgagggtcacgtacagcgtggcgtcgatcaggcggtagttttgcagcaccagtccgccctggcgtaaggccataatctccgcatgggcggtggggtcgtgacggcctatcggccggttccagccctcgccaatgacctgattgttatgcaccagcaccgcgcccaccggcacctcgccctcttcccaggcgcgtttcgccagcgtcagggcatgacgcatccagtattcatcattgagttcgaggtcagacacagcggccactccagcagaaaaagcggggcgcattatacatgggcgctatcaattacacactattactccagctgctgaagctctccctgaggggttacccgccagcgatgctggcaaaagccgagcaatggattatcctgctcactatcgctatagccgctatacagccgcagcggggcgccaatctttttctccagctgtaccaccttttcatgccccaggcagcgcagggtcaatacccagccgccccagcggcgcgcggtgcggctggctatcagattcacccgcggcaaccagagggtatcgcgatagacctgctccaccagcgactgcggcgagccggtgatcaaccagacgtcggcatcggtgctggtcaggtaggcggtaagccgcgcatgaactaccggaaacgccgtcacatgatggcgaaaccagccgacaaactccgcttccagccgcttcagcaccgcctcgcggcggccaaaggttgtcgcccacagcaggaggctcatcggccagcgcgccgcccgtccgctcactgccagcccggcaaggatcaccggccccatcggcaccaccagcaacaggttcagcggcaaatggcgcagcagatagcgcagaaaactgccgaacatatcctgttggtgtaaggttccgtccagatcgaaaaacaccactctccgttcagtgtgctgcaaactgcctcctttatctcagaactcgcttctcgttagggtaagcttaacagcctgacgccatgtcgagggaaaacatcccctgccgttaagaaagaattaaagtagcaggcgaaggaaaaattgtggcttaagaatttttaattcatggtataccccttataatcgaataaaaattctgtcagtcacgagccggacggctccagcggagctccaatgaactgtttaacgcgtattcgtcagcgctatcccaccctggcggcgagcgacaaaaagttggccgattatattctgagccagcccgatgagacccggcacctcagctcgcagcagctggcggcggaagccggtgtgagtcagtccagcgtggttaaattttcccagaagctgggattcaaaggctttccggcgctgaagctggcccttagtgaagcgctggcgagtagcccggatccgcactccgtcccggtgcataaccacattcgcggtgacgatccgctgcgtctggtcggcgagaaactcattaaagacaatgtcgccgccatgcatgcctcgctggacgtcaacactgaagagacgctacgggaagccgtcacgctgctgcgcaacgcccggcgagtgatcgtcaccgggattggcgcctccggcctggtggcgcgtaactttagctggaagctgatgaagatcggcatcaacgctgtttctgagcaggatatgcatgccctgctggcgacggtgcaggccatgtccagcgacgatcttctgctggcgatctcttactccggcgagcgccgggagatcaatatggcggccggtgaagcgctgcgcgtcggctgtaagatcctggcgatcaccgggtttagcccgaacgccctgcaacagcaggcgacccactgcctgtatactatcgccgaagagcaggcgacgcgcagcgccgccatctcctccaccagcgcgcaaatgatgctcaccgatctgctgtttatggggctggtgcagcaggatctggagcgggcgccggagcgcattcgccatagcgaagcgctggtgaaaaagctggtctgagcagaaaatgggcgtataatgcccgccctgtttgtgttgtttctgagactttcctgatggcgctgttaattaccaaaaaatgcatcaactgcgatatgtgcgccatcaggtaatttacccttaaaattcaaacaattattttcttgtgttacttgctgtgttgctgagaaaaaatttttactttttttaaaatccactcagcaacacaaaatcacatcaccggacactcatcatcatccttccctatccggttaataacgaatgtcactattcctaacactacgacgtcgtcgagtgcttcaccttccagcgcctcaccatcacgagtaataaacgccttccccattactttcgcaaaatccgtaccgccggtgtattgaattaaaacggtgtctccttgttttggtttaacggagaaatccacaacggcatagcctgtttctgttactacaacccgagtattagggccggtaccgcagagtttatcgacggttaaccgcccctccacatagtctgctgctggcgacggaaaccccacgttatagccctccgttctggttgtataactggaacgttctttcatctccttcctgcgttgagacatcccggaatgtcgtcacatagtgctctatccactggttagcctgccgtggcgaccagtgccagttaacttttgcgagttcccggataaaaccggacgttgtcacggtgcggcggccattaggctcaatgacaattgcctgacgccaggctatttcgatatctgagtttcgcggcataatctcacaccataaagagtcgcggtagggatacccgttaccggataccccccgcacagatcccggcgtgcgcgatttacgcaccgggctcctgcctcgggtgtctggcggtgaaccgctccacaggccatggatgaagaacccgaacccttggtagccatgcggctgccagtttgtttgctttcgtccaggtcgtatcatccttctggctcctgcgcctgagcgcccggcgccagaggtttgttacgtgtgtcctgaacttctgcatggtggggaagttgcccggtaccgagtgatagttcaggtatccctgaaccactctcctgagccattttccctgttcggggattgagtaatgccagcgccttcgcagaccgtctttgatggctttcagagttgccgtcatccgatcccggcgggtctttcgtatcagcatgaacctgccgttgcgatctttcccgctgatgtgcgtgaacccgaggaagttgaacgtttctggtttgccttttcccctgatggcacggttttcggcagcgaagcggccgaactccatcagacgggttttctccgggtgaaccgtgagtccgaactccctcagtctgcgctgcatggctatacggaagcgccgggcatcgtatcgtttgtcgaacccgatgacgatgtcatcggcgtatctgaccattaccacattgcctgtggcatagcgacgtcgccactgatgcgcccacagatcgaagacgtagtggaggtatatgtttgccagcagcggtgagatgaccgcaccctgtggggtgccttcctccgttgctcgccattgaccctcctccgacgtcccggctgtgagccacttacgtatgagcctgattaccctccggtcgccgatccgatgctctgtgaacctgatcagccattcgtggctcaccctgtcgaagaactgactgatgtcggcatccagtacccagtttacgttagtgcgtaccagccctgtggccagtgcgtccagtgcatcgtgctggcttcgcccgggtctgaacccgtatgagaaccccataaagtcgttttcatagactgcgttcaggattttcaccagcgcatactggacgatcttgtcctccagcgaggcgatgccgagcgggcgttgttttccatccgcttttgggatgtagtgacgcctgccgggctgcgccctgtagctgccctgatgtagcctccggtgcagatctgttatgttgttcttcatgtttccggcgtagtccatccacctgatgccatccactccggcggccgctttcctgctcagggagaggaatgcggcttccagtgcttcgactgtcagcaggtggaacaatgctgtaaaccgttctttcttccgctgcttcgcagcttcccgcacgcgtgacagcctctgtgacatgctttcccggctctgtgtccggcgcatgtgtggctgttccgcgttccccttggccccgctccttcgctccactgactccgctcctttcgggttgttcgcctgcttcgccgctactatgagcgagtccgacttctcctctccgtacatcaccggctatgactcctcgtcttcccggtgcgggccatctccgacactggcagatggtcagaggggagatctcccggttcccgcgtagagatcgtattgacatgccagggtctcagaccccgccgggtccatgtggcactcgcagtatcgcaccctatgatgttgccttccgttaacagtacaacgtcggcacccggtaatttaatatacatttcgtggctcaatggctggcctgtcaacacccctgtcaacgcttcgccccatacctcgcggtatgcaacgcatgactcggggaccttgtggattgctggtccttcaatggtcggggactttcaccccttgatctctaaccggtctcccggcgcacactgtttttatatacagtagttttattgaggcttaagatcaagtacgattgcggccatcaatttacttgacagccgatgttactgaatcataagactttattggcatttaaccaatgaatcccatcagttgtcgtgttcgctaaagcactggagtattcggcgtcaagaagtcttggttgctgacctccttgatacacctgcctttcaataagagagctattaagtcttaccttatttttgttggtgatttttattaattctcctgaaatatctttatggatacccttatcaataaaaacaaattccgccccatccatgtgataactgctttcaagattctcaaaacgcatactggataattgagtgctaccagtcgtatttttgaattttacgccaatgccttttccgttacccttaattttaacagcgttaataacattgtttaatgatgctgaattcattctattaagaatgatcccgttagagcccggattatctatatggcatacggaaataacagcatctccgcatgactcaaggaaaataccagaacctttagcattttttattatactgttgctaacaatcacattacgcgattccccagagttgaaacgcccaccgctataatcgttaccaaaaatatcaatcccgttatcgtttgttccatctactgtgcaagaactgatgataactccatttggcctgtcgatgcttatacctatgtatccgcaattctctactcgacagtttgtaatattactgtcgactggtccgttattgcttttagatgagcgaagccctattcctattccgccgttaccttttcttgctggaggatttatagcattaacgttatctatcgttagtcctctagagccgataatattaatgcagtttattgccccatcaacgttttgtgagttaccatcaatccttacccctgagattatgacatctgataattcttcatcatcccagtttgttatgattgaaccaacaccggaatagcttccaggcaatagccttatagttccaacaccaatgattgcgcaccctggaagcaagttaatgcaacttccacctttagactgcgcattttttatttcaggtgaatcagggttaggtgccacgttgtaaactcctgctggaagaaacagctgcaccctctcattgatggcgttctgtatgtactttgtgcaatcagcgctcggatctgacgcattaaacgatgcaggcaggaagctcctgatgctagccatgccagtttgtgaaatctcagatgacaccttcaggtaggccggagcctgttgaggggatgatttcgcttgtgcagatagtgccagaagtcctactgccccagcgcctgaaagtaagaaatctctcctgtttttcatgtagttacctgattttgttagatgtggattaagaaattgaccaccaatatcaatagcatgttttttgtgatcagatcatggctttactcttaaagctaaagtatgctaaagcagactaatcctatggaaatggaaagatggcaagcattgttcttttttttgtttacgtaatgttttttataccaaaaatggatttaatttctctcgggggaggatttaacgctgggttgagggtggatgatttaattatttgcttattatttttcttttttttcttatatgctgcacagaataaaaagacaaaggttagtaaaatagagctttattttatattatttctgtttgttactttccttggatcactatttagctcaactcaatacggaaggggaacagttctatttcctatacgattctttgaatactttgtttttttctatatgggtttctttttgtacaaaggaggggcaaacattcgaaaattactcctccttttgcttatagcaaactctgccgttgcgatccttcaacactttggagttgttggcgggttcaacgttagaggttatcagccaaacatgtctgagcgcgtaattggattaactagcgggccttgggaacttggggttatacttaactttattacatgctattttcttgcggaagaaaagagcgagcttaagaaatatatcatattcggtgtcgcaacattaattataatgatgacaggatcaaggatgtctttgcttgcacagattgtcattctggtatggtatatgaagcttagtgcaagtctggttaccatcattaaaagatgcctagttgtcattccattactgtttgcagtgtatttcttctttggggatagtacagtcgcttcccgttcagatagcctcatgaacagtgataatatagatcagttactcgactcatattcatctgtaaggattacagaatcagttccgtcatggggtgatttgggcgttctttccaggggggatgaggttgatgcaagctggagcatgaggggtattaaatggatttacgccgttaaattatatctatcgcatcctatgtactggatgataggcgtcggggctggatcatttggaaatgcacttgatggtggctggttgaggatcactacagagacgggaattatcgggctattactgttcgtgatgttcctcatgcgcgtaaagagattatcaccaacaatgtctttatgtgttatcgcattttgtataaacatgctgatgatcgatatctacatgtcttataaagtaatgtcgatgatgctccttctggctggttattaccagaagaagaaaaaaacagaaagagcgctaatcagacaagaaagtataaatagacacgactctgcatttgttaagagctgattgctcatcaaaaaaatggatggccatctataacgaccatccattttattttatcagttttaatagtttgtcaataaaattcacagactatatttgtctgaagcataatttgcaacggaattaatttcatccgttgtcagcaggcgctcccatatgaccatttcagcaaattgcggtccggtattggatgagccccctgggtctttaccaaatcgtaaccgccgttgctcatccattgaaccacctctggtcacgacaccagatttcgttacggccgcagttccagctccgatcagttgcaacgttacagcagccgctccatcagctgggatggtcaaaacagcagcatatcgacgcgctgaaatagccacacctcccgttgccggatcgttggaaatgctaagtgttgtaccagcagcaccggacattttggacagcccccagctggcgcttgcccggctgaaccgcaatcctccgatggtcagaatggagtgagatgcggagccatgaacctcataccatactgcaagcagactgacatcaccgaatttgcggttaatgtccgttagtgctgcctgcgcccctgtcatggcacagtcgaccatacgaacacctgactgatcgacaatcatcggccgattgattgtgtcacccacaaggatgttatccggcatcagagggctgggatacgtggatatcgcatcaccgactgcgctggtcgcaaaatccagcgccgggcgccagcggtcggtataaccggtcacgccgatggcgggagcgtaaggtgcataatttttaatggacgggtcagggctggtcaggctgcctggtacaatttcaagggtcatggttaaacactccggtaaatagcggcaaggctggtgtaatgtgcattggtggcacgcggacaggtcagcgggttttgcatacggtcagacatgcggatatagctcaggaattctccaggctgggaagaaccatataccggccagttaaacgccccggttggcaacgccccggtgatgtcgtcctgctggctgtcaaaaatcgccaggcggtgcaacagcgtgtcgatatagtcctggcgaggttcggcaaacatgtatgcaattgccggggcataggacagctcgcctacaggcgtgcgccagtccatactccataccgaaccatccgggttataagccagcgcccgcatggtgtcggccatatgccagagggctgctgatggcaccggcttcccggccagcaggaaggtacgcagcatccactcactgcctgacagtgaagccatcgtgtaccagcgggacacgtcctgcccgtcagcgacgccgtggttttcaacgaggcgggtcgggttaacgtttgtcccgttcatcacgtcgcaaggtgccaggccgttaatggtcatcgtctcggaaaggtcgtttctgtcacccagcgccgcaatctgcatcgtaatcagccgctcggcccagcgctcagcattggcgttatccggggctacaatcagtgcccgggcgagaataccgaggttccatgccagttcttctgatttggaatcgcctgtcgggtagttatccgtcacctgcccccggatatccgggcgcgtccagcggtatttgggcgtgtacttcacgaagcggttagcctcatgtaccaccattgcggcgacttttgttttctgagcagccgtcaggtgtgcgcccatcaggtcgcagtggctggccacattacgtgccagctctgccgcctgtgagccaaaggtcactgccacatcttcagaggcttcgctccacggcggcggcgggcctccccaccaaccaccgtttgccagatgcgcactcaccaccaaatccagcccctgcacaatccaggaaacggctgtgtcataactgacgccaataaacgtttcgtcccaggtggcgtaaccagcatcacaccagcgtatccagtgaaccactgcggccagcatcagcggatattgctctatgctgtccatcgtggaaccgctagtcggtagtcccgtgccgccagccaggggaacccacgtcggtacccaggtcgacagcatatatttacaggcgcgcagagcgagcggttcgactgccgcgcgtactgatgcgggtagcggcgtgaggaccatttcaggacgttgattcaccgattgccgggcgcgacgattgagcggtgggaggtaattaaggcgccctgactggtcggcttccagcaaaacaaccccgtctttgacaatcgcgtgacctgccgggatatcggccggatcaaggtcatagactgcgacacctttagctgcgtatgctgcgacgttttcaggcgctggcaatccgtccattccctgaagagtacccggcagtaattccccgctggacataacctttccccaggcgtaattaactccgtcagagtattcatctgtacgtcttacggcagtctttcctgaaatcatggttcttcctgtaggttgcagtacgcctccagtgtttttgtactcaatagccagataagcatcatcagaactgcgcacataggtggtgctgccctcagggatgttcgcgatatccgcctgcgcagcctcaatcgtcatgtactgcttgctgagcggaatgatgttctgccggatctcatcgtttttcgccatcatctggcgccaggtatccagcggttcaccgccgcggtcgttaaccgttccggccggaccgttaaccagctcgtcagcgcgcttgacgttatccaggaatatttcaggcgtcgtcgttcccaaaggcgggttaagttcggccatttttttgctccaaaaaagaggcttcgcccaaacgagggtttgagcgaaaagagttaattaggggaatttttgggtttaggcgacgtcgccggggtatgtggcgtcatcgtactggtagaaaatttctttatattcaggtgcagtaatctgacagttgctgtcacctgatggggcaacctcctggactatcccatgccgcgcacccttttcactgtcgcagaacaataacttcggcagatcaatatctgggtcgtccataatccagtcgccgggatgcaggtcgtcgttgtacggcaccgtcagcgtgaaatcatctacccgttgcggcgtgagcattcgcgatgatggtcgaccgtcctgaaactgtatccagcagcgaggattcgcgtagctccagtccagtggctccgtgacgtgcagcgtaatttcctggaagtcgtaaatcatcgcgtcaatcaggcaactttgggttttcccggttggaatgtcgtcggacaaaatgatgtgatcaccgaagtcatgacaccatcccagcatcgaagtcgtagccgtatacgttcggcgttggtggagatatttcattaaccgacgcatcccgatacgccaggcgcgatctgcagtcatggcaacatcaatggtgtatgcctccgttttgcgcggaaaaggattttccggcgtccggcactgtacggtttcctccgcccaggtcacagggttgatatatttcacatccacgccatcaaaatcatcctccgacgggaccctgaatgacgtctgcatttcctcgacggtatcctgaggagtaatgatccctgtccagcttttgacgccctctctcccgacagaaagcaacccgtcagacagcagaaaataccccatgccagcctctgcaattttgtcgaaaatatcctttgctgacgtgctgtcactgcttgcctggtgatcaaaatattcgccccttggcgtccagtaggtcgcctccagcgtactgagtgccgcaatgtcgatctggtcgtcgcgataacccagactgcgggcaagatgcaggaacgcaccgctgattgtcctgtcaccaccgccatcataattccgcgtggcgacaacactcacacgcttgtctgactgcgctgccagctggccgccggtttcaaccgtgatccctattgttgatatcccagcgtaggaggtcggacgggaaagcaaacgacctctgagcgcctgccagaacatgctgtctctcgcgttgttgctcccctgctcgttacggcggcggcatcgaacctccaccagcccgggagaggacagatcaaaacgctctgtaaaaccgaggccattaacgtttttaagcgcgtaaacccctggcttactcgtccaccctgatccggaaccataaacgcgatactggatttcatactcgacatggcggacccgcttattcccgttgttctggaacccgcaaattccgtttgggaaagcaaagttgacctcgaaggcgtccacaacttcattttgcgggcaggccagaaaggggccgagccaggtttcattatcgttaataccagacgcggcaaaatccacgacggttctggtcataaagcctgaccaggtgctgtcaacgacaccgttaaccatacgctgtacggtcgcagaggggccatcagttgacgctatctggtattcgttgccacggtgcgccagggaaatccgctgggtgccttccggcaatccggaaaaggcagtgccagaatcgtatgccagcgtcacgctggctgttaccgcagggcttccgccgctggatgctgtaccagctgtaaataccgggctgtcgccaaatactgacgcaggcaggaatgatgacgtaatggaaccgccacgccaggggctggagatctccacgatacgtatcacgccgccatcatcctgagcaatgagccccgaaccattcaacccgccgttaatcgctgcgagcaagccagacattgtgccgtagttggcgaccagagatatggtataggtgataccctgccaggtcagagcaaaggtctggctggttgtcgtaaagtcatacgttgacggcgaggcactggcgcgtaataccgcagtcgctccccctgttcccggaacggcgtcctgatgaggggtatacgtggcgatctgcaggtcatagtcagtaccgttaaacgttagggtgacaggcattccgctgaatggcgcaatctctgacacgacgtcgcctgtcagcacgttaaaaccgccctcgatggatacctgataattcactggcgctttcagggtgacaattgcaccggcgatccagccaggaggaagtttgttctcatcctcgtcttcatcattatcatcatcgacatcgaggccagaaaacgagacagaggcaccgctgacggtcatggcatcagcaacgatatcactggcttcaggggcagtctgagccatatcgaggccgctgccgctcgacgttcccccaacttccgttgagttgaaccatatctcactgcgacgatccccagccacattatcgccgggcccatagctggtatatgaaaagccctcgcctaaggtcaacgccggagtttctcctacccgaaaatctccaccggtataggagaaacgcccatatccaaggcagacaaacatttctaccgtcattctggtgggatcagcgggggcgaatcgcgttactggctgcaccaggtaatccgggtaaatccggtttcgcccaaaagcctccctaacgggatcaccgagttttgcggtgtttgcccgcgccgggttcagatccagcgatgaagcgttactggatgaaaaaccgcccagctctggttttggggcaaagaataatgcataggccgtagacgcaatggatacggccaccgaaacccacgcggcaatttcaagccccgtgccataaggaatgggatatatccgcacgtcactgtctggccgcaacaaacataacggccattccgccggggggactgcctggccgttcagctcgatcacgacaggatgagttttatcctgtgaatagctcgggacatttctgctcatccactcatgcagtgtcagcacaccatgatcgtgcgtttcaaggggttcacccggtagccgggacgggtaaaactttatcgtcattgccagaactccacgcggttaaagcgacggataaatctcgatagtggcagaaacgtaacccccgagcctggattgcattccgcgacctgcaactggttatcgagcattacaacgatcccgacatgggaaaccgttgagcccgaatagcaagccactccggcaccttcacagggttcacaacgtttcagcgaaagcatcagctttctcgcttcccggtcgaggcccccgccgtctttggtcacacctgcaaaatccggccattcaggtagccccaggtcgcgacgtatctcatttacaatgccgaagcagtcgagctgcggaaatacgcgcccgcccttcagccaggtgactgaacggtatttatcaggattaaacatatttgcctcaggttagtaacgtaagcccggatgctcggcgaggttgtaacgtttacggggccaggctgttttgaggacattcatatagcctgccgtgacctgaactgctgtcggggtccaggagccggatttgatatcgagcgtatacggtgatgatgccggagcagacagatcggatgaaatgtaccgccggaatgtcagcgtggctgatttcatttcatccagaattttatcgatcgcctctgaaacccttccgtcaatattgctgatagcaaactttaaatcctgtgtcccgtcggcgttcctggctggcaaggcgatatctatcgcgctggcttcaaacgtcgccggctgaccattttccagcatcacggaaacgtcatcccagccactggttagccagtagttatcatcgcctgccgatatctgcagcgtgtcgtgaatgacctccgatccgctgctggcatatagtcgctcaagaattgtcatgcttcggccactctctgtttagcgcaatatccagtaacgactggcccgccagccattccgggtaattcccccagccagaaggcggtaacgggcgctcccataattccagcgttgcgctgtactgccagtattttggcgcgaccagcgtcggcccttcgtaaatatccacgaacctggctttatagggctttaccccaatgggagtctgaagtttcagatagaaccaggactggccatctttaagcgcatccctgaaaaacgcctcaaacacctgcgccagagcatcagttttaaaaatccatttaaccgatgcctgggtgggtgttgaggtatatcgccttcgttgttgagcgcgaccggacgtcatctccgttcgcagtaaaggtgatatgggcttaaacccgtacccgtccataagcggcatgggcaggtattcatccgggtagaaaatatctgccatgaatattccctccgggcaggttatcgtggttttttgggctgaaggttggaataaagtgctctaccgaaggcattttgaggattgtttacgtcgctcgtcagttcagattttatctgtttagccaggcggcggccgtgggcatctaatgtctgcatcatcacatcatccggtttaccagtgaggtggtaattaacgttgatgtcaccagttgaaagaagttgtctttcctgctgctgcctcgcagcgttctgtaccgccggcgattcccgccctacagctttaacccccagcgaaccatcagcgccacgggtaagcggcatgatggcttccggcccggcctcgccgaatacacctgcccctttcgcaaacgcaaaatattggggagtgctgtaaacgccattgctgtaggcagaaagtgacggagaatcgtaaacgcctccgagagcgttgaatgaaaaattagctcccgcgctttgaatagcggtaccactacttgccgcaccgctggcaccgccaaaaagactaccgaacaacccacccgctccgccgccaaatgacgccataatcgctttggtgatcaacgcctgtgttgccatctggatcagcgtcttaatcaccgtttcacccagggaagagaaaatattagacatcccatctttaaaagaagcagcgcctgtcaggacgtttgtcaggttgttggagatagagttagtggtggcatccagaatctcgctggttgcagtggcagccattgaactcagatcagaagcctgatcggcatagttcatcagggaatcgctgatccccgcgcgccagtctgactgctgttcatcggtctttttgtagtagtcctcctgaatcgctaaccgttcagcaagcgccgcttgcagcgcttccgtttgctgtttgtactggtcttcagaaatttgcttcttgttaaagtcacgctgaagatcatcctgctgcttacggaagtcagtgcgaatatccgccatttccttcatgcggtcgcgggccttatcccccatcccggcgccaagaaaatctatattcccccggtcacgcgcagcggcattactgtcagccagcccctcatggaacgtttttaactgttcagcaatgtttttctgatcgataagcgcagcattgtgcagaagggtttcttttttagcttgctcaagagaggctaactcaccctgtgtgacctggtattttactttagccagttcggtattctggcttcccagggcaatttgttcctgctgctgtttaataaggcgcttgtaaacgtcttctgtcttttcagccgctttaacctcttcgctttttggcgctttccgggtgggtttattggcttcatcgttttgccatttcgccaatccctgattaataaacagatcgcggttagttttaaactgaggttcatccttaagccccaattcgtcagcggcataacctaaccgtactctctcccttgcttctcctttaagctttgatagttcaaggtcctgacggcttttttccagagcattggcttgctgtgatgttaaatcagcctgaggcattcgcattggaacattaaccaagccctgccgttccattaaaagctggtttcctaatccaagtaaacggttaacttcggaatacttaccagtcatcattacaaggttctggtattcagaattttgccgccatgctctttcttttataagatcgtttcttcttctttcttgttcctcctgtgcctttagtatatcgcttgccttttctcgcatctgacgaagcttgtcttcttctacgacaacctgctcggtcaaaattgcaatagcctttataatatttaaatcattttcttgagttatacctggtttgcttctactttcatttaaatcatttatttgcccgttaagtttttttacactttgttcttgctcttcgattaggcgtttttgctcctgcatcgcctcaaccgttaatcttcgattactatcgacctcaggtagggtcattgaggaggttttttctctgatctgatctatttggctggcatattcctgagctgattttcttgcttgctcctggctttggtacatagcgtaccatgcgcccgcacccagcataactaacccgggtataccaccgaccagcccaagagccccactcatcaaccgggtgccgacagaggtaacgctgttaaggttattttgagcagaagcccggcctgcaatattacgactaagagcggactgagctgcagccaattttctttctgcaatagcctgtgcatcggcattttttgcagccacaagccccgcctgagcacgctccagagctgttcgtgctcgtaccttttctgtagctgtcccggtggcgagggctgtagtcaatcgcccctgtgccgcggtaacccttgcttctgcggccgctaccctctcctgttgagcagcctgaacatcagcacttttagcactctgaagggcttgctgggcgcgataaacggcggcgcgggaagcggcaacagaagattgcgcggctttttcctgagcgacagcaagagctacctcagattttgccgccgaaataagtgcgccagtagcactgcttgcactcgtaacaattccgccaagataccgggccaatccgatcccaaccaggcctccagcagcagtggtaattagtgacatattatctgctacgtcactgagggccccgctgacagcagaagatgtaagagaatccagtgtacctgccagaccatcaagaccgccagaaagcgcgtctgtcgcgccagtcgcctggttcactccaccaacccatgccataaacgagttagtgactttttgcattgagccggacactgtcggcggcaacgaggaaaactccccctgtaacacacctaactggctgattaatgctggtacgactttatcaatcgtgagttgcccctggtcagccatcgctttaagatcttttcgagcaacccccataccagcagccagggcacggatgacgcgatccccagcttcgttaaccgcgttaaactcttcgccacgcaaaacaccttgagccagcgcctggctaaactgggtaataacagagccggcttcttctgtgcttgcaccagatagctttagtcctgttgataccgcttcggtgattttgagtacttcatctgagctgtagccaaattcacgcattgatgctgcagcgcgtgaaaataaattagcattatcagtaaaagcagtgcccgtactctggctgatcgccattaatcgggtctgagataaagtaaaatcattcgtagacactgaggcttgtttaagccgtgcatttactgagttccattggtctgcaatctgaaccagttttcctgttgcaaatgctgcagctgcagctgtagctgctcgacccgctgaagcaaatccatccgttaaatcggaaagagctttttggctttctttcgcagcggcagcagcctggcgcccaccattctgcatggttttataatagtcttgccccatgcgtgaagctcgggcgatctcagtctggaatgattgagagtttgctgaaacctttatgataagctcacgtagggttgccatttgtatcctcacaggtataaaaaaaaccgcctaagcggttttctttaattagcaagaatgtatcaactacaaatctcgccccatagtttagaaaattcagttccaccatcatcaataatggtcattccacttttacttacataccttttaaacccagcatatgcaccaaagctgtttttagcatttacttgtccgcatacatatccgtcacgaccaacgatctggtttttgaaggttgcagattcggggtcttttaattcagccttaacactagggttgcttgctgatataacattcatgttgttgtatcttttctgcctatcgttctcgctaattctcattagctcctcatggttctcatacctctccccccacaaagggaccattgagttaacaaaaaacaagacaaatatagaaccgagaattatcaaaagagaagcaatttccctgccaatcttatctatatattttaaaggaataaccaaaacaacaaaaagaaacacaattgatattggttgccttaacgcaataataaatgctatagcaaaaactactaaagataaaacgcccaatatttttttcattttttatcccaataggtagaaaagaactaaaatcctaccattggttatgtaaaacttcagctatcattgtttgttcaaactgatgctgcgagcaaagcggcctccaagcctgcaaagggatcgccgccgtcgtttacctcaacctcttctgcgctccactgaagctgagcatcttcaatggtgactttaccgccctgcgctccgtaaaccgcagataccagctgagcattgaggatatcgccgcgaatatcgccgattgggctgatacggtcgtactcagcccacatcctgaattcgccaaccgtcattgtttgtcgcagttcgcccagcgtgcggcccatccggagcgccagcgccatcaggaactgcatgccaggcatttttactttgctttagcatcatccgcgtcacgaatgagatcaagtgcctgcttcaacagccgggaatgcacagggccatagatcgcttcaacctgttcggtgtcatcgacagtaaagacgggatgcaggtcggtatccagcaaaatatcgatgaaaagcgtgacgtcggcccgcatcgtgcggaaggctcgttctgaaggggtcagttctggtgcctcctggggctcctgcccttccggtagtttgggtggttccgggctggcaatgccctgccagcgaatccaggcttctgctgatggctcacgaatgatgactttggcgttatcccactccggaacggagacttcttttttacgaaagcccgccatcggtgccagtgccagtgctttaagactcggttttgacattaattttatcgccggtctcccggcgctccgttaattgatggtgacggtgcaatcagaagaagtgatcacagtgccatcggcatcagtaaccacgcaggaataaaccccggcatcaccggatacagcgctggctttcgtaaacgttgcgctggtctggccgctgaccgtcgaggtgccctttttccaggcgtaggtataaggtgccgtaccgccctggacgaccacgcccatggtcagggcgcttcctgccgcgaccgtttgggacgccggaaggtcagtagcaaaggacaggactcctggggcgttaatattggtgggtttacctttcagacgcagcgagaacgttgcagcaaccacgccattggtttgagaatcccaggtgtgctgtcgtacctcagcgcgcatcaggaatccattaccagacgggaaaataaccttaaacccataaaccccgtcgttatcatatgcggcacgaagtgcatcctgcgccgggttgcggtagaagttaccggaaagtgacatttcagacggagcaggaaggccgttgatattttccgtttcatccgaacagagcgttgtcacgtcaatatcgtttttctgaccagcggtaaagcttgcctgtttgatagtgcaactcaggtttaaccaggttgcggtatccagctctgcctcggtgaccggcacagaggtaatcattactaccgttttttgggcacgttcaaatagtgctgacatcgcagcctccataaatgaaaaaaccgccagtggcggtcggattggattggtttttgtcaggcaatgaccgttatttcgagggttgcccgatgaagatggggtgtcgtgtcgtagccaggaatttttgtcacctcgacaggtgaaagtacctgcaggcgagccagggcgtccaggcgtaacgctctggcttcgtcattcgtttcagcccatacatcaacctgaatgcgcagtgtcgactctgcctggccgcagaaaacatccccggcaacattagtcggtatcgagaaaatgacatagggagtggaaactgcaggaagtccgtcgctgcctagcggcaccacatacggataaacccgcccgtctgccagcgtcgacagcaggtcatagagaacatcctctgtcattttgataacacctcatcgatagcctgattcatccgctgcatcgccacctgcgtagcttcttccatgcgggtatcaaaagctgggcgaacaaacggatgtgcaggcgctgtagatgttcccaactccacgaagcgccagtaaaacgcattccgcttgttgctggccttcattgtattgtcgctgttccccgttcgcgggttaacgccacgaatatgcacccccgatgagatttcacctcgacggcggcttttctgggtgacgacaacaacgtttttcttcagtttgccggttttctcaggagcgcgatcaatcacctcctcgcggagcaattcggcaccagcacgggtcgactcccggagaactttattattttcggccttgctgagcgtttgcagatcgcgggcaatatcctgcaacccggaaaaatccagattcacatcaatcatttttcggtcccctgtttgcagagaatttccagccgggtacctttgatatccggaaccggagggccggtaacgttaagaacggcacctttaaacgggccggtgcgtactttcaggcgggaagaagctgagatatctgtacgaaaacgcacccagactcgaatggtggcatcggcacgctcagcgccagcggctaaaagttcacgaccgcttatacccttaacctcggcccagatggttttcccatcttcccatttttcaaccggctgacctgaaggcgttctggaggttgtgaagttttgaatggtgacccggtgccgtaatcgccctgcctgcataagtccccctacgtcccaggaatttttcgatgctgttccagaattgatttaacgccgaacggaatagtattaacgctgtcgctactaacaggctcccggttttcataccagtgcgaaaccaacagcatcagggccagtttgatatcgtcctcgattaccaacccgtcagggtcgtcgtctggaacagcgttatcataaagacggcaatttgtgattttttcagcgtgcttcaaggaggcattgaggtagagagttaacatcacatcctctgtatcgtcatcgctgtcgatacggcactggtaacgaagctcatttacagagggcttcatttgccttcaccccgcttattaccgactttaggcttaacagttgtttcagtttccggttgttcagtgccgtcaagaatccccatttgagcagcaacctcaagagcgcgctcaggaagtgatccagactcatattcaccggcgggaatgtttatgatctgaatgccatcaggtgaccatttcaggtcttttttcagcagcataatgacctccataagaatggggccgaagccccatcagattatgcgccagcaccgatctgcagcagtttgatggcctgagaatcggcaagcattccgccggtacgtttggtggtgtagaaaccaacgaatggtttgttggtgtacggatcgcggaggatgcgggtaccaatacgatcaacgatggtatagccacgtttaaagttaccgaacgcaatggctttcgcatctgctgcgatatccggcatttgctcattctcagcaacaccataacctgccagagaagagggttggcccaactcaaggcccggacgccagagatagttaccctcggagtccttcagaatgcgaacggcaaacaggctgttgttgttcatcatgaatttagcaccgttgcgatgaaccttgcgcagggtgtagaccagtttgataatcgcatcggcagtcacacccgccgccgcaccggaaagaatgtgctgcagcgtgccaaaggcacgggttttatcgtcctccagagtggaggcgtaggccaggaagcctttcggttttttcgtaccgttaccgctggtaaaagcgatttcttcctgttcggagaactcaaccgccagttcgctgttgatccagtcctctacattgaagaaggcatcatccagcatcgtttgggttgcctgagggtttccgtagatttcacccatgaacggttcaatctgaccgagtttagacgcatcagtagccggacggggatcggtttcaccgacccagccggaagcggtgccgccaaggttaaccagctttttatagttggcaccgccaacagtgatagttgtggcctcctggcgcatcactacttcatctttcagaagattaagaatggtgcggtccagctcttctgggacagcatatccgccgtcttcatccacgccaacctgcagggctttacgctccagatcacgcaatccgtcatccttacccttgcgcataaagtcgatgaaagcggttttgtgctcggttgcggccttgctttgagtgccaccagctggacgtttaacctgtttaagctcatcctccagcgcggttttaagctgatccagctcggtcagcttgccgttaagtgtttcaacttctccggccagcttgcctttttcagcttcgatagcttcaatgcgcttatcatttttcgctttaaaatcatagaatttttgctgcaaatcctgcgcgacctgctcaacgtctttaatttcgactgccataattcaactcctgattaaaatttgatgtttttcagtgcatccagtgcggcatccacaccatcagcgtcacgctgagagaggttgccatagcccccggccatgaatgctttggcctgggtgcgggagagcccaacatcgcgcaggacccgttcaatacttttctgggatggtgtttcgccacgggcaaacgcgcttttaacatcgctgacccgcgcctcgtcattcgacggaaacgttacgggactgacctcccaaaggtcgatttcctttaggagaaacacgcctttctcacggtcgtattcccagtcttttagcatgtaaccaatagaaaggccggttaaagaaccggccttcatgtgggcatgcgctcgctttgaaagaggatcatcatcaatgagtaaccggcctttgacatataagccgacgtcatcctctttcatttcggtataaacaccgataggttcatccatctgatgctgccagagcatagctggcagcgcgtttttctcccgccatgactgaagcgatttactgaaagcgccgggaacaactacatcgtcgtaactgtccttaacgccaaacacagagccatagccttcaaattccccgctgtcgctgacagactttagcttcagcggaatatccagccgctgtttagtcatcggcatcatgttgttcctcggttattttgctcttattgctgtcagacggtttggtcgtcatattcatcggcgtcagataaacgtcaccgccagagcgtgggttcatatcctccagttcacggcagtcatttggtgagtaaatgccccagttaataccggttgaatacgattcaaatcttgatttcatatccccacgcagcaaagcaccggcattaaacttggcataataggtgccctgcttcgattccttcaccagccccacgttgattcgctgctcaatacgggtcatgtacggaacgagtgaatagttgatgaagccaatgccaaggttttcaatattgttgaaggtggcgcggtcagtgttctgcaccatatgcatcggcaccctgtacaggcggcagacttcctccagctgaaattttctggtctcaagaaactggctgtcttcggcgttgagtcccatcgacttccagtcaagacccatttcaagaatcatcggacgatgcgcattgctgagcccaaggtggcgatcttcaaaatcttttctcagccgttcataggctgcatcagtcagcgtttgctcagtacggagaacgccagaagtgaccgcgccatttgcgaacaatcgggcgccgtgttcttctgtcgccatacccaaagaaatggcctcccttgcgtatgcgattgggttcaggcccaccagcccgtcaaaggtcaacgtcctgacgtgccagatatcatcctgacccagcacatccgtagaaccatcagggaacgtgacctgatataccggttgccactgactgttaagcttagggtcaacgcagcccggatcaatgggtaaaagctcgaccacttcacccagcgctttgaccttgtaggcataaaaattaccgcgcaggcaaagacacacaatgaccagctcccagaactcctggggggtcatatagtcatttggcttcatggtcagtaatttatgcagcctttcagaggtcgctttttgcttgctgttaccagtgattttgtacaggttgcagggaagcatccccatagactcagccagaactcttatgcaaccaaagactgctgtaagtcgcatcgctttctggctgctaacgcgctttccagtgtaggtgtcgtaagtcatccctacagcttccgccagttccgctggcgtcgtgaccgatgcggtgcttttcgtaaacattccgggaaaaaacattagccaccctccccggattcaattttccagttaccggaaagggagcgggatacaagccatgaccagagcaggcacagaataccgccagtaatgtagccagcaggggggtaaataacccaggcaccgaatgagagcagaatagcccccagcacaccaacaagtggcgcgagtatcatcagaatcataattgcctcttaaagtgagcgcacgccatagctttcgagatgatttgaaagggtttcttccttttcaaataacattgcccgtccaatcgccataatcagagcaacagccccatctattttattttcgttttgctctttaattggccgaacaacatcatcatttccaggcaggtgcttacccaccacgtttgaaatacaccaggtcattatcggattaccgtcatgatgaaatcgaccggactctacagcggcctcaagctctttcatcgggtcagacatgttggtgtagttctggataatggttatagggttgagctgttcatcagcaagctgatgagaaaggtttgttgcaccgtgcgggtcaattgggctttgttcaaccggagtttgctgattatcacgcttggcatcttcaagtattactcggtaatcaatttccgcaccatcagtcacggtgatatatcctgcttcaacccatttacggtaacgctcagcggtgcggtgatcgtcaacatcgttgctgtatacggtgtcatacggaacatagaagcgcggagatatacagtaataatgccgtttcccatctatttcacgggtaaatagccgaaccatagagttcatatccagcttgcgcgcaaggtcaaaagacagaatgcagggctgtccttcaaactgctcaatggtgagcgtctcatcctcacattttcgccagcttaacaggttgaaataagcagcacgtgcggcgacccagatattcaggtgtttcgttttgaatatcccggccatgcggggattatttttggccctgctttgctggcttaagaggaaatccgagtaaaccgacacccccatattgggattggctttgtgaagaacagcgggatcggtccagtcatcaccctcatcaacggtgtaaatgacgccaaaaagctcatcattcggcacggttccgttcagcatttcgataacttcacgacgcttatcgtagcaaggcccctcaatgttataaccagcagtggttatagcccacataatcggctgtctgcgggcccccatgccggtgatcattgtggtatacagcgcatcgctttcgtgctcgtgatattcatcaacaatagcgcaatgcggtgactgcccgtcaccaggattaccgatcagcggttcaaatctggcgccatcttcaggacggctaaggttcttggcgttaacctctattccaaaggcttcaacgagtagtggcgtgcgtttgcacatcagccgcgcaggtcgaaatacttcccatgcctgcttttcagtggttgcaccggaatacacctccgcaccaaattcaccatcacaggtgaaacaaaaaagcgccacaccggcgcttatcgctgacttcccgtttttcctggggatttctgtatagacctctctgaatcggcgcagcctgctgcctttatgcacccatccaaaagcgcagcaaataataaataattgccagggttcaagggtaataggcatccttttaaatgcccattcacctttggtgtgcgggagaagttgaataaaccgtgcggcacgctcagcaaggtctttatcaaagcggtatcgaaatttctttccctgcgattttgacaaatcgtcgatatgtcgctggcaggcatcaatgacatactggcatgccggaatctttccggcgacaacatgccttgcgtactgatttgcagcgttaacgtttggataggcttttcggctcatggcgtgatcatcttcaggaatgggttttcgttctttttcttcccggccagaccgaccaggcgctgtcggctgctggggtccagccccaacattgaaccggtagaactcatttccgattcctgttcttttttagccgtaagttcagggtttttaattttcccgcccattgcgccagtgatggataaaccatcaacagctatattttttaccgccctgcgccagaactcataggcaacgcaccagcgctccagtactgcaagatcggtcacgcagagcaagccctgtccgcataattctttggtcgtcagctcccacatgatggatgctaacgggagttcctcttctgcaaaccagtccggaggtgctacgccattgatgggggtgaatactggttcttctttattcagggctcgcttgccggggtttccggccagctccttgcgcgccgttggctttggtctacgcccggaacgccccgccgttccagccataagcgttactcctggttaaatttcatttttcgcgggtataaaaaattgactgaggcggcggtcctttgggcctttgccgtcagggatttgaccccgcccccccatccgccccttcaaatgagaatagatatcatttaatgcgttcgcgaccggttttcgttcgatggcagggccagcacaggctttcgaggttcgaatcgtcatcggtacccccatgagccttggccttgatgtggtcaaccgtctttgctgcgacagctcgcccgctgcgaaggcagttctggcacaaatggttgtcgcgtttcaggatgcgcgcacgcctgatatcccactggctaccgtagccacgctcgtggcgactctttccctgttgatgctgttgccagccttcattgcggtgcttttcgcagtagcctgagcggtcggttgttgtgcctgcgcatccacgcttacggcatgcacggggaattagtgcgggcatccttatcatctccaattaaaaagccaccgtttaaaaggtggctttcataaattacaaagggattctatagaaggttttgctttgccattcttagcttatgttcgagatttcttattgttatccctagctcattaactttctgcttggtatatcgatctgaatatatccagtagtctgatttctgctcacatatttctgacaactcaggagaaatatcttgaaataagagaccgacacgtctccactcctttgcaagttcaagttccttttgagcgtctttaataccttggtgtgcgaaatccctcaggtaggcccgattatctatcaataaatttgatagtgcttctaacttggatattgttagctctcgtttctgtttggaccatgacaaatagcattcccataatccagtaatagcagcgcttatatattcgcccatatttaacgacctggttgtgtgcaagtagttaaacattatcacaggcactcagtgaatgcctgctgtaatgccttaactggcctgctcagccgcggtatcaaacagcgccagcgcctcggtcgattcctgaactgctttgatggtccgcgccaccacttccgattcagttgtcacgcggctgtactgctggatgaacagctgatatttgagcgggctgtcctgaacgaacgcaatagcctcttttgcagctgctgtgtcgtagttcagggtggaaaacagattcagtcggatctgttctgctggtgtgatttctgacatgtcttacctctgtgcgatgtggggagcattatcgaagccactcaatcagtggcttctgtaatatcctcacatggggatgaaggttgatttatcccttagtggggttaacgcttaggaaagttgaatgcctactgctctttggtaaatgacgttatgcctaattcagtaagctgatgctttaccgctccaatgcgtcggctaagctctccggtaacactcctgcgtatcgcattaacaaaatcatcatcctgataacgactctgaatcgtgatgcctaacccttccccgcgtgcgacgagtaagtattgcccttcaagttccttaagcttttcgcataagattgaagcagcgttaacattatgtatgttcatttccgtttaccttgccgcagttagcctgcaccgatatgttgtgcgtcagaatgtcgcgcttggtctgcttatccagcacgtcgatatcgtggtcggtcaggtagatgatccgcacccagctgcaggccgtatcaacgactaccggggcgggtaaacttttcgcgcagctcccgatcaacatcgtcatcaggcatatggctaacagtctgctgtacatcgcttgcctctttcgtgacttctgccttacgttctgctgcggcgacagtagcagcagcgttttcttcggtacgctgctgatcggctttggcttctgccttactggtcccgcgtgcatgaccaatgccgaacgctccaacgatagcacccaggatgacaaccaccagccccgcgattgcttcgattcccataatcacaccaccagtaccgattttgctttcaggaaacgagcgcgccggttattaatcccgttttgtccgccgttgataatctgcgtgacccggacaagctcacccggatatttcaagcaaccttttgagacatagaaccacgctgcactacgggccgcgtacgaggactgctccagtaattctggctgtgccaccagatcaaccttcaaaccgctgccgcagtccctgtaattagaaagtccggttatttgaataagtccgcgccctcgataaacccagccatcagttgccctgttgttacccaaccgcttgctatagacaatgttggcgatagcccgctggcgctccaggggtaacacagtttcccactggctgcgcccgagggaattggcctgatcctgcgttaacctgccgtaacgaacaaaatcagcaagcccggcgatgctgtagttgaaattctccaccaccctgttaaacccgaggctttcatggccgcattgagcaatgaacattgcctggtcgatagcggaagtgatgccaaactctttcatcgcggctgtaatatgcggaaaccagcgcgcagctaacccggcgctgataccagccgccttctggaattgtgtttgattcattagtgcctcagtgcatcaaccagccgcgctacattgcctcttacgctcagcagcacaacaaggatcatgatattggccgcaatggtgggccatgatgaatagggatagatgccgcacagatacgccaacggcacagagctgtatatcactgttatcagccatgccagccgcgacacccacttacgatgacgtgagtctctgcggcgatagaacatcaacgttacaacgacaccagcacataacagcgcattgatggttgcagtaggatcatttagtaccaccggaacctccccggcgcgttattagcgccaccagcgagccaatatcctgattgttcaggaaggtgagtatttttacggccaatgccgaaatgattacggcaccaattgcatccagaggcttatcgttgtacccggtaaggtcggataacttagaaccgaccagcccggagcacagaactccagcaatataggacacaacgaaatatgccatccgtcgtggggcgctcaaatcggccgctgtcgctatataaaagacggaaccagcaaatgccccgaacacaacaccgtagtctgtaccggttaatagcccgtaaacactcgccccagttaaagcgccaccagctaagcctgtgccggttattggttcggacatcggtccccctctattgctgtgaatcctctcagaacgaggggaaagaattcaggccgcaggctcatgcatttcacggttaatctgcaacttttagtcagggcctgaaatgaaaaaaccccgccaattggcgaggttctgtaatatttaagttcgtgtctaagtgaccactcttaacacattaatatataaaattcgtaacgaatagacttttatgcaactttctcaacttcttttttatgggcccaatcatccatttctaatctggcaccactcataatgatgcaggcatcaataaacgtttcggctatcattaacctgttacgtatttttccctctgaacatttttcccagcgggcaatagtcgatttagaaacattatgcatgtaatgcaacatcaccagatttaactcatcatcccggccagctcgtttaagcattcctacggcagcgtctacaataaggccatcattgtcacaacatgactcgcgagactttgaggtatttaacaggaggcctttaaaacccgctgcaattggtgaccagtcaacctgtgagccttcactaatagcccaggttccccaccgttcgagtaccagttgaatatcacgctgcatggttcacctctttaatcagtccggtaataatttcgatactgttgttgcattgatttccccagcggtcccatcctttccactcttcccgagcgaatagttcgatccgtttcacatcaccgtataattgctccagtcggttccttacttcccacggtttagcgctgtgctcaccgaggcaggtgtgaacaacctgttttaccgatgcgctggcgcgggttagtccggttcccttggtcgctatcaggacatcttctgtattgctccgggtatgattgccgccgttcatgcgcgtctcacggtccagcatctcaagaagatcattgaagtccaccagctttccggcgtttagtgccttgttgaagcggtcagcggcgttctgattcagttttacccaggtaaagcctttcattgttctgacccggaaaccccatgattcagccagttctacagcctcgcggttatgggtccccgtataccacatcgccagtacggcgttatcagcagccagagaccagacagggagccgtttcaggtcttcaatgctcattgtgctgtaatgattacaggctgcgccgttgctaattcggttgccatattcccacggcggatcacagtagataagatcgtaattcatgcggccctctgctttttcagttcgcgagttttacggcggtatttagccgctatgttttccaggtcttcttttgagtaatgcttcgcttcgtgtgggccttccagccattccaccagcggcaatccataccactcgatcagcgtctccctgtagcgggcatgtacagtggcattctttgcagcgaaccgacccgatccaccattacaggctttgcactgccggtaagcattcttctcttcaaagcgcaattcaggacgagcgcctacccccatgaaatgaccgcaatcccactggccgccaaagatcataggtgggtgataagtgccacatgatgggcatggtttcccctcgtcgcgttcacggataaaggcattaaaggctgactgggcttttttgatgtagtcgccacgggtaagcagagcctttttgcgcatcttcagcttgtccttctgttccgcctccgcttttttttgtttcagcgccctgttgtgggctatagcacagagcgggccacaaaccttttgcaggttgcgggccggagtgaaggtttcaccacagctggcgcacttcttcggtttgtacgttttcacctttgcaggcgctggtttcttcactgtttcatcccccggtgaaatacccactcgaatacttctgagccgttaagcagcagatcattaaaatcaccctgcgcaggccagcgcacggagacactttccagatcattcttcgcgtgcagatttgccgcagcgcattcaaaagcagcggcatgacctgctgcgttggcgtctgagtcagcaaaaataatgaggttctttaccccggcaggaacccggaatttcttcatgaaggcagtattcatcgtcgcccaggtgttgcacttcgtgatctggtggcaggccagagccgtttcgatcccttcagcaattcccagcgttgaggatattgggaacatgcgaatagcaacggatttggcaaactctaaatagctatcctcctgcagtttcatcatcttcttggctgcgccgcctgtttgcgccttcttatcaccgtcaagcagggtgcggtgcaaataacacaattccccgcggtcatctgtagccagcgcataaatagcctggaggttctttccatctactggctgtttatcgcagtacttgatgctctctgctgggagggagttaataccgcgccccttcaggtagctatctgcaccggtaccacggagagggatgagcttcgaaaacttacggctgactttgtcacgttgttgtgccagagatgtacgcaccggatttactctggtccgatccgaggtgtaggtgttcccgatcagcctgtctatttccgaggccagaaccttaaattctttgccagtcttggcagtcagcaacgcccagccatcgccagagccacaaacgcagatatatgacccggtgccgtctttatcatcacagcgaaatttacctgtacggccacaaagagggcactctcctttgagatggtttttcccggtaatacctgggaggccatagtatttgtaaatttccgcccagcgaccaatagcagcttgtttggtattcatgcggcatctccttctttctcttttctcttcgcaaaggcgatctgttttgatttgatgaaattcgttacttcaggcgtgatctgttgcggggtgtgatgtaaccccgaggccatactgaaaacttttgtttgtaggtatgcgcacaccagccatcactgaccgggcgtccctgcgctgcacgggtacgctggtaaaacagaatctgagaccaccaggattgcttctgctcagcggtatatttgacttccgctttgcttacctttttcagcccacgggatttatctgtttccacgtcttcaccggcgagcggtttaaaaccacatttcgggcagatgtaaatcccagctggtttgacgtagtggcactggctgcattctttcggcagtttttccgcttcatcggtctttacggctctctgcggcgcgtcttccatgccatcagacgatgaagggaggtagtcgtattcaatatcgtcgggatagcccagcttattaaccgtgcctgtgtggtcgaagatgaggcagtgatctttaccaggggcggcgcgcaggccacgccccagaatctgaatccagcgcatttcgcttttggttggtctggcgaagataatgcagcggacatcactatcaaaaccggctaccagaacaccaacgttaatgatgattttggttatgccctgctcgaagcggcggatcgttagctgtcgttcgtcgtgcggtgtgctggccgtcatcacttcaaccgtcacgccagcgctggcaaattcaaccgtgacaaaattggcgtgagcgacatcgacgcaaaaacaaatcgtcgggcggtcttcgccgttctccagccagtttttcacgatatcgcctaccagcttggcttcgctcattacctggctgagctggttttctttgtagtcgctgccatagcctgctacgtatgacgtttccactttggacaggtcaggatgcgaaggcgcatagaactcatatttgctcagtgcaccaatggcgatcagttccttcatcgtcgttggcttaatcaggcgctggtagtaattgcccaggaacttagcgaaaggcgtaccggaaaggccgattaccttcgttgctgtgttgcgagtgagattgtcgataacctccagcagttttttgcgcttgaggtgggcttcatcaacgatcaacaggtcgatattgtccgggaactcacggcgaatcagcgtatccgcactggcaatctggatcagagctgtggggttgtatgacgggtgatcacgccagacataactgatttcttcgccaggaaggccgtattccatgaatcgggctgcggtctggtccagcagaaccgtatacggagccacaaacattacgcgcatttcacggcttacaaagccatcagtgatcagcgcggctattgctgttttgccgaaccctacaggggcgtagagcatgaaggagttattctgtttccaggcgctgcgcagcatgtttaacgcgactatctgtttttcgcggggctggatgttaagcattagcagtaacctccacgaaggccatagccaccagctcggcgatgacaaacttagtgcgctgacgctgaaccgacaacgtaacggttttggtcccgtctttgcgctggcggcctttaagaaaaccgccgtgaatgcgtcgaataaaatattcagagttagccaggcgcggaatactgcgtacccgtccgaggttgctgacttcgtaggctttggaatacggctccaccggaacgggggcccatttttcgttagcgtctgaataaatcattttggctccttttggatgtctaaacgtctgaacttccaagcgacgttttcaaccccatacagtgatctatctgttagatcgttctcttctggtaaagctgttccagcccttcgggctaaaacccaacaccgccccctttcccccaacccggattcagaaaatcaaacccttggtgggagcgacgtatatcccctaaccgctggggtatacctcgtgcaaaactctcgcaatcggcggtttgccgtccgtcgtgcggcgttctgctgccggaatgacaccggctctgcatcgaacgcttcctggtacgcctgcgcatacgccaacgcgattttttcccgcatacctgccgggagtgttgccaactgctctttaatccacggggcgtcctcacgagcaaaaaccgtgggcatagtcacgtggaaatattcgtcctggtacattggccctcctgcttgcgtggtgagcctcacagagttaattaccctgaatttgaaggtccatttggaatgtcgtcaggggagcaaaagaccatgaaaagcagcgctaaatgctcctgccacttagccatgacctggtaactgttcgcttcaatttgagcgcgttcatcgcgatctattacgccgtcagcggttgccttccgaaggtattgagagtgttttcctatccactcaaccgactccatcagtctttggttgatatccccgttttcgacatcttcaacatcggtaagcggtacgaaaactcctccagaggctttcgcaatagcattcgcgatatggtgtgaaccaccagcgcgctggagaaccattgcccacccaaacgggaatacctgatcgccatcagtacgcagacggttgaacaaggagttctcagtcacatcaagccattcggctgcttctgcatacccgccaggtaattccgcgatcgtctttttgattgcggccaccagccaggctggctgtttttcgactttccaatcaggttgattacccacggtttacctcgattagctgtggttactttcactgctggtttgatgaataattgacttcaccaacctggcagactttgttaagacgattttttatggcttgggaaaggtctaatttcctcgcccttaacgcttccatcttgttgaatggtcacataaatatttcgtccgctacgaatagccttacttattgcgcattggataacgccaaagtcgctggcagttttttcctgaccgtgaatcttggcgtaatcagctaatgtcatacgactcatggacacgctccgtattgatacatgcaacaaagaatacttggggtatttattggtgtcaatatgaaaggtatttttagttttaatagtgatggtattagaatgacgttatggaacctaaaaagaatctgacgacagaacagcttgcagatgcagcacgtcttaaagctctgtatgagtcaaagaagaaagcgctaggcgtcacccaatactcaatcgctgatgagctgggcattacgcaaggagctgtagggcactatctaaacgggagaaatgctcttaacctcaccgttgccgctgcatttgcaaagattctgcaagtatctattgctgacttcagcccttccattgatgaggaagcgcagaaaatattggcaaatgagacatccaatgtgaagctggtcggtacatataagcaaggaaaggagtatccattgatcagctgggtgcaagctggagcctgggcagaggcaattgaaccttactcagtcgatgagatcgatgaatggttcgagtccgatacaaaggtttttggtaaagccttttggttgcgtgtcgagggcgactcgatgacagcgcctactggccttagcattccagaagggaccctagtcttaatagatacaggccgggaagctataaatggcagtctcgttatcgcaaaaatggtggatgcgaacgaagcaacattcaaaaagctcataatagatggcggccaaaagtaccttaaagggctcaatccggcgtggccactgaaagaaatcaacggtaactgcaaaatcattggtgtggctgtgcaaaccatgatgcgcttggtttaagcttcaaacccggtacttcaccgggttttctctatacaatctcctctcccccttcacaaaaaaaatacctttagaattcatatccatatcataaatccgcccaaaataaatacccagagtatttacaacaaagaatacccctagtattctaaaattacaccagcggaaaaacaccatacgtaaacattacggacggtgcattagctgaatgtagtcgaacggcgcgacttaaaaccatgcgtcggaaccgtggcgggacaggatgtcggcaatgcgggttagtgaattaatcaaaggcttcgggccttttactagtccacttcatagaggctcatcttgtgactatcaaagcattaagcgtaaaaactaacagcagaggtattacatattgcctgcgatccaatggggataaattcgaagtttggaaattatgcgaaaactattgtcgccttacaaaaggcggtattcgtaaaacctggcgttatgtcgaaaaaggaatgacgctggaaagtgcgcaaagactgtttgagcgccgcacgaaatagtacctccctcccactatgaattatccatgtaattgctgtgtgtagtcttggcggttatccagtcttccaccaatcaaacaggaggaagaggataatgttctgatggaaaaccgccctttttattcaatgtgtccgctcccggtgttggctgggctgcccaacccagcgcaggttcaactcctgccggatacctaattaatcggtgatttatatgaccttccgtaacgttaatttcccctacggcgacctgatgcgcgtccctcgcggtgtgcaagctgttcgcaaccctaaatcattcgttcgcttctggcggcagagctggttgtacaggcttcttacccagaaaggcgatccttgctgataactggagataattatgtccgaaaccaaaaataccacgccgtttagccagcagctggcgtacatcaacaaaggcactctcgatgccgagctgactgaagcgctggccgaagtcatcaaggctgtacgtgaaacgggtaaaaagggagctgtgacccttacccttaactgttcaatgctgaacacccgtgacgaaaacaccatgaagatcacgccaaaagtaacccgcactatcccggaactggaccgcgccgataccattatgttctctaccgctgatggcgatctgctgcgtgatgacccggcgcaagttcagatggatttgaaagttatcgaacaagcgccacaagctgcaccgattaagctggcccagtaatcccctttcttcccaacacctctatctaaaggaattattcaatgtctcaaattgaaggctctgccgtgcacgacatccgcgatctggttgctgcaacgctgaaaactgataccgatatcccgtccgtcgtcgtcccggatggcttcgatatcaaatcgctcgaaagcctccagattgccccgtctcgtattcgccagactacaaacctgatttcccccggttcgctaatcgcatatatccagcgattccgtgatgcgcgttctgttgttttcgctgataaaacccaaacgaagatcgtcgcggtgctggacttccaccaggacgccgataaccctcactggggtatgcacaaagcagtgtatgactgcccattctctgatgactggaaagcatggatagggtttgacggccgcaagatgaaccagatcgactttgctgagtttctggaaaacaacatcaagaatgtcgcgccgattagcgataactataaaggcccgtctggtaccgatctactggaaatggtactcgcctttcaggagaccaggaaggttgagttcaagtcggttaagcgcctgcaggatggaacctgtcagttccagtacagcgatgataagtccggctccggtaatacccaaatcccggaaaaaatcagcctggcaatagcgcctttccataatggcgcaccgtaccagatcgatgcgcgcattcgctaccgcctgcgcgacggtcagctggtcctctggtatgagctgatcgagccgaaaaaaatcattgagcacgccttccaggagatcgtagccgatatggaaaaccagctcggcgatgaactgcctatctacgaaggctccatctaacccatccatcccgtgtgttgttttatgcgcccccaggtggggcgcatagcgaagcactccctaattcaaaaaggtgaccatatgcccagcttaggccagctctataacgataaagaatccgggttaactacccgtaaaacctataacgtcccgatcgcctcaatttatgcggaagaaggttacaacgttcgcgaactaaatcaggcgcatgtcgatgagttccgcgatgcgtttattgccggtgaatatattccgccgctggccgtagaagttactgagcgtggtgtgaaggtgatcgacggccaccaccgctatcacggtgcgctcgccgcaattgctatgggacacgatatcgtgcgccttgagtgcaaagattttgttggtactgaggccgataagatcgcgtttatggtgactagctcgcaagggctggcacttactccccttgaacgtggtgcggcgtatcaccgcctacagaatcagggatggagtccggcagagattgccgtaaaagttaagcgttcagagtccgatatccttcaacatctccagcttcatgaatgcaccccgtatatcaaaaagctggttcgcgatggctctatgaactatgcaattgcgattggcatttctcgcgaacatggcgtttatgcagaccgggaagccgccaggctgatgaaaaaagcagaagcagccgggaaaacgaaagtcacaaagagcatcgccaagccacaattcaacgcaggaaaggcgcggaagtttctggagatcatctcatcatgcaaagagaccaccagcggcggactgattattgaagtaccaccagcaatgcaggccgaagtgctgtcgattcttcaggaattccgctacgaaacatcagcacctagggaagacgagaaaaacaatgaacaggcctcatcatctgaagaaagtgatgccgcatgacagaaactatcctcaaatgccctacctgtgggtcgttagctcaattctcctggcatggtcatagcccctatatgcgttatggggctttgcaatgtccgcacaaacaccattctgtaaaggtgacctaccacgccgatagcattggtgctgcgcgattgaatctgattcaacaatgggaggtgttagtaaatgattttcaaaatttaccgtgatcccattctgcgaaagacattcatcctggatgcaatagttctggttggagcggcatcgctttctgcgctgggaatatggctggtcaatgaatgggtggcagcatgaatgtcaaatgcttaaaagataccgaaggatactggacggaaggagaaatatatccggcccgtgtagttgctggcgggtttgtccaagtcggcgacgatgacgatcctaatggcgaaggctggagcgctgcaccaatggaatatcgtgaagatggctcgatcgtttatcaggtcggcggtattgagggtgatgtgttattcgaggaggccatccatgactaatatcaccgaactgactagcgtacaaaaaaacgcaaatattcaccgtttatccaggctcattgcctatacatctaacgacgaattgcgacaaatggctgttgaagttgagcattacacggatcagctcatagaggcactggagaaggcgcagaggatggaatcctactggaaaactcaatgccgtgggataacggaccattgcgaggagttgcaggcgcgcatcgccgagctggagtcccgcaccgtgaagctgccagctgaaagattttgccctgcggagtacgccggtagtcaattatggtcagaaactgaagtttggaataaggcgatcactgcatgtgctgacgcacttcacaccggtggcatcaaggtggaggctgagtgatgaaccaaatttttatccgctacgaaaattacaatggttctagcactcgccaagaaatcgccggttttcagtttgacggcatgagaacttgggtcgatgtaggaaagttacgagacggccatcgcggcgaaatcaagtgcgttagatgtggcgcaaataactggacagataacgggcgaagcatcaacgagtacgaatgcggctgctgtggatcgtttattactgtggagcctaaaagctaatggcgaaattaacgaaaaaagaatcggcatggttcgatgaagttaacgcagtgctggcgcgctgcccgtcgccggaaaaattcggtttctacaccattggtgaccctaacatcatggtgtacgacctgcgcaaagagaaggacatcgagcgcaaacttgacgagcgggcatcttccgattggtgtgtagctgtacgagatgctgacgctgaaatcgacgccaacatttattttccttctgccgtactgagtacggcaggataaggagccaaccaatgactgatgccctgaccaaagaaaaaatcattgatgctatgcgcagttctattgagggcttcgccttcttaatcgtcgattcgctggagtttgaacttaagcgccagcttaccgacgctgaacagcaggaggtttccacagttgttgagcagttggttctgacgtttcctgaaccatgtccgcgctgtggtgtaacgtctacgcgtcctaatggtgagcactattgccatgctaacagcgtggaggctgaataaatgactaataaccagttaaccagagaacgactggaaaaaattaaactatggcgtgaaacctacggagctggaagcaacgtaatgctgccagctgtagaggctgaggagctggcccgcatggcattggccgcaatggacagataccaggtacgcaacgagcacgccgattggtcacaatcaacattcggtaatgttggcccgattggccccctgaagcaccttagcaaagaagcactggaagccgctgccgagcctggagacctgtcggagtgggctgatatgcagttcctgctgtgggacgcccagcgccgtgccggtataacagatgagcagattacccaggcgatgatcgataaactggcggtaaacaagcagcgctcatggccggagccaaaagacggggaaccgcggttgcatatcaaagcgcagccagcgccagaaaaatacaacatcggtgatgccaccatacgccacatcttcacaccaaccggcatgactaatgtctctgacatgcaggcggtatttgaccgagttgaagctgttttggtgggaatggagcagccagcgccggtagtgcctgatggttacgtgatggtaccgatgaggttaactgctgagaacggcgctaagggagcgctatccggtgagttttcagaaaccaagctcgtaaactgcccggaatgctttggtgatgatgaatgtgaaacatgtgacggcagcgggaaaattgaaataacagtacctgtcacctggacgactatcaaagctatttgggttaaaggtgtcgagcattttgcagccacagcgcaggagaatgattaacgtgaaccatttaatgatcgacctggaaactatgggtaataaacccaatgcccctgtagtctccatcggtgcagtattttttgagccatcaactggtgaactcggcgaagaattttatcgcgttgtcagcctgaaaagttcgatggatggcggtgccgtacctgaccctgaaaccattatatggtggatgcagcaaaacgaagaggctagaaaggctatttgcgacaaggatgcgatatcgatttcagctgcactgattaagctgaatacatttattctagataacaccgatattgataaagttcaggtatggggtaatggtgccacatttgacaacgtaatccttcgtgccaactatgagcgggagtttttaccatgtatctggaaattctggaatgaccgcgatgttcgaaccatcgtcgaattaggtcgggccataggcattaaccctcgccgcgatatcccgtttgaaggtgataggcataacgctctggctgatgccaaacaccaggctaaatacgtttccgcaatctggcaaagacttgttcacaaataaaaagcatatgaggtgtaatatggctgaacaacctgatgatctgctcactccggatgaggtatgtggaaaattgggcattacgcaaaaaaccctatgcctgtggaatacaacacacaggcatcgcgccacactggcaccaattaaatttagcgcaaaagtagtacgctacgaacgtaaaaatgtcgaagccttcattgaaaaatgccggagtcagtactaacccctcctccttatcaaagcagcctgcgctagtatgctacgctcgtgagcctcgaaagcttcacgcttcagcgcgatctcttcctgcaaaatctcatccgaaaagtcgtagtgttctgccatcgggtcatctgacttgctggagtgatgaaggcacaggaggctaatttcccttcggtctgatcgggaatagcctctttccttcatgagggcaattacattgctcttgaggaatttacggcacatcgtattaaatgccccctctttccccttaatcgtcccgtcatgcttcaatcctttgactgccccttctggactgtatgtttttaccagcttatccagagaccgtttagagaacggttgcattgggtcacgcggctgcaggaacacataatctttattgcattcaggaaccgagtcacgccaggctttctgctcgtcgataatgcgtcgaagttcaggcgttatcggcaggcggaaagccttttgtgttttcatagcaccacgcataccaataaccccctccggatagataatttcgccagcatcctcgtttacatagtcccagcgcaggttatgtatgttaatcggacgtacgccggtgatgatcataaacctaacggcattcttttgatgtattgatggacaggccgccacgttcaaccacaggcgggcgattgattcaatgtctgtaaaaagacgtgtaggggtgggtttctgtacgcgggaggatacataatcatcaggcagactggccgcaatgttgcgcccattacaaagcgtaggggagcagaacttccagagcctgcggagttcggcgaacaactccagagcgttattgttcgagcgggtggcgatccactcgtccagtacctccaccagccgattgtatgttacatcgctaaatacttcgcgctcaccaaacgttgccttaatcctgtcaatgcgtaccccgtaagtggtgaaactatccggactcaatttttgccttactactttggctttaaggtcatcccggtacagttcaatcgcagcatggacggattctgatcggaggccatctccagccatttccgccgctttctctcgggctagctggatcgccagttcgggccactcccccagctttttccccttcagccccatttttttgggaaattcagcgtaaaatgtaaccttaccggctttgctaaaatcaatacggagatagttctctttctcgtatttcgaccgtcgggccagaccagatgctgagaggatcgttttcgcagcagcaacacagattctaatgtgtgtgctggtatagggaggtttacaggcgtcccatttttctgatgcggctaaaacatcgtcgttattggggctatctggtttctgtgttacagtgcgcggcattctcaatccttatctgctgaggcgcagaattaaagctcacacatgcattggtttttcgtgagtaaaaacgctatgtgttgctgctttgtgttattggattgagtttatcagtgttaattgcactgtatcaacatacagtaagttaataatatagaacgataggaaatcgtcgtaacttactgatttaaaattgatttaacggtaactgcttgatatgtctttactaataactaagcgctgtatcaattgcgatatgtgcgagccggagtgcccgaatgaggccatttcgatgggtgacagcatttatgagattaacagcgaccgctgcaccgagtgcgtgggtcattacgacacgccaacctgccagaaagtgtgcccgatcccgaatacgatcctgaaagatccggcacacctcgagagtgaagaacagctgtgggataaattcgtgctgatgcaccacgcggataaaatttaaccgccctcctggctagctttcgacaatcaccgtggcgcaggcgtagtggcgttcatcagcgagagtaacgtgaatagcgcttactcccatgcgttcagctaaaaggtttgcttcaccccatagccgcagcttcggcttgcccagctcgtcgttgtaaacctcgaactggttaaacgccagcccgttacggatcccggttcccagcgctttcgccgccgcttccttgaccgcaaagcgtttcgccaggaaacgcaccggctgctggtgctgctcccagatgctccattcatggtcgctcagcacccggcgggcaaggcgatcgccgctgcgggcgatcaccgcttcgatgcgggcgatctcgacgatgtcggtacccaacccgagaatggccattagccgcgcgcttccagcatcagacgcttcatttccgccaccgcctctttcaggccgctcatcaccgcacggccaataatcgcgtgaccgatattcagctcatgcatttccggcagcgcagcaatcgctttcacgttgtggtaggtcagaccgtggccggcattcaccttcagcccgaggctggcggcgtaggtggccgctttggcaatacgttccagctccctggcctgctcggcgtcggttttggcatcggcatagcagccggtgtggatttcgatatagggcgcgccaacgtccgccgccgctttgatctgcgcttcatccgcatcgataaacagggagaccaggatgccggcatccgccaggcgttgacaggcatcgcgcatcttgtcgcgctgcccggccacgtccagtccgccttcggtagtgacttcctgacgtttctccggcaccaggcagcagaagtgtggtttggtttcgcaggcgatcgtcagcatctcttcggtgaccgccatttcaagattcatccgggtgtgcagcgtctcgcgcaggatacgcacatcgcgatcggtaatatggcgacggtcttcgcgcagatgcacggtgatgccgtcagcgccggcctgttcggcaatgaaagccgcctgaaccggatccgggtaagcggtgccgcgggcgttacgcaaggtcgcgatatggtcaatattgacccctaacaataattcagccatgacaatcctcgttaatcattattcgtattatcggctcgcgcctttcgcgcgggcataaactggcgaaacaactcccggctcttgagcggtttgccgccgagatagggcttcagggcgatacgggtaaagcgcttcgcggcgcgcagcgtatcaacatcaggaaactcgcgactcgccaatgctttcaaatggtgcccggtaaacgtgttgttatcaatcaccaggctggcaataaagcctttttcttcacgatagcggtaggtcatggtgtcgtctaccggctcgccgctcccggcgcagtggagaaaatccacgccataccccaggtgcccgagcagcgccagctcaaaacgccgcagcgcgggctccggcgagccgctggccccggcgagcgcctgaatgcagtgcaggtagtcgaaaaagagttcggagaagcgtgtttcgtgctccagcacgcgggagataagctcgttaacgtagagaccgctgtagagggtgatgccgctgagcggcagcgccagcgaaacggcttccgcgctgcgcagggttttgacttcgccgcgcccgccgaagcgaaccaacaagggggtaaagggctgtaaagcgcctttgagattagagcgtttggagcgtgcgcccttggcaacgaggcgcacgcgaccggattcttccgtgaagacgtccagcatcaggctggtttcgctccacggacggctatgcaggacaaaggcgcgctgccatccatccacgttgcgttaactcagaggtcgtcaacgtaaccgagactgcgcagggcgcgctcgtcatcggcccagccggatttcactttcacccacagctcgaggtgcaccggcgcttcaaacatctcctgcatgtccttacgcgcttcgataccgatggttttaattttggcgcctttgttgccaatcaccatctttttctgcccttcgcgctcgacgaggatcaggccgttgatatcgtaaccgccgcgctcgttgctgacgaaacgttcgatttccacggtgacggagtacggcagctcagcgccgaggaaacgcatcagtttttcacggatgatttcggaggccataaagcgttgtgagcgatcggtaatataatcttccgggaagtgatggatcgcttccggcagatgcttacgcacgatcgccgcgatggtatcaacgttggtgccggtttccgctgagatcggtacgatatcgaggaaattcatctggctggcgaggaactgcaggtgcggtaacagatccgctttttcctgcacgttatccaccttgttgaccgcgaggatcaccggcgctttcgcgtcgcgcagcttgttgagcaccatctcgtcgtcctgcgtccagcgggtgccttccaccacgaagatgaccagttccacgtcgccaatcgaactgctggccgctttgttcattaagcggttaatggcacgcttctcttccatatgcaggcccggagtatcaacgtaaatcgcctgatacggcccttcggtatggataccgacgatgcggtgacgggtggtctgcgctttacgggaggtgatcgagatcttctgcccaagcagcttgttcaacagcgtggatttgccaacgtttggacgacccacgatggcgacaaatccgcaataacttttttcttcgctcattccagctccagctttttcagcgcctgttcggcggcagcctgctccgccttacgacggctggaacctgtgccaaccaccggttcactcaggccactgacctggcagtggatagtaaattcctgatcgtgcgcttcgccgcgaacctggaccaccaggtaagacggcagcggcagatgacgtccctgcagatattcctgcagacgcgtcttcggatccttttgcttatcgcccggactgatttcgtccagacgggtctggtaccaggagaggattaagcgttcaacgttctgaatatcgctgtcgaggaaaaccccgccaattaacgcttcaacggtatccgcgagaatcgattcgcgacggaaaccgccgcttttcagctctcccggcccgaggcgcagacactcgcccagctcaaactcgcgggcgatctccgccagcgtgttgccgcgcaccagcgtcgcgcgcatacggctcatatcgccttcatcgacacgaggaaagcgatgatacagcgcattcgcgatcacgaaacttaaaatggagtcacctaaaaattccaggcgctcattatgtttgctgctggcactgcggtgagttaatgcctgttgcaacagctcctgatgatgaaaagtgtagcccagctttcgttgaagccgattaattacgatggggttcatgcgttaccaataaatgaatgcgtcaaagatgcagcacacgaaaccgacctgagcattcgcttcaaacagtaatttgaaacagaccaatacgctttcgtgtgcagtgtcacccggcagagcgacaaccaaaaacttcggggggatattctatacgcaacgacacgggatgtcgttagtttgaatggatttaaatactaaataattcacgccgctgcgataacagcagcgacgtgaattcagcagaggaaattaatgaattccaccaatgcgcgataaccgcacgccggtcggccattcaccttcctgcttttcaaaactcatccagatagcggttgcttttccgaccaggttggcttccggcacaaagccccagtaccggctgtcggcgctgttatcccggttgtcgcccatcatgaagtactgaccgggcggcacaatccaggtggccagcggcagaccggactgatggtagtacatcccaacctgatcctgggcaatcggcaccattagaattcggtgcgtcacgtcgcccaatgtctcctgacgctcggtaagacgaatgccgtcggctttggtttcgcccttcggcaactgccagaaaccgctgctcgcttcgccgccgttgctgcgggagaaggtctgaacaaaatcgctcggctccacgttggaataggtcaccggcagcgcgttgccgcaggcctgtccggaactgcagcccggctgaatagtgacctgtttggcaaccggatcgtaggtgaccttatcacccggtaaccccaccgcgcgcttaatgtagtccagacgcgggtcttccggatatttaaacaccacgatgtcgccgcgcttcggatggccggtctcgatcagcgttttctgatagataggatctttaatgccgtaggcaaatttctccaccagaataaaatcgccgatgagcagcgttggcatcatcgaacctgaagggatctggaaaggctcataaataaatgaacgtaccaccagaacgatcgccagcaccgggaaaaccgatgcgccggtttccagccagcccggtttcgggccgactttcttcagcgtcttcttgtccagttgctcgccggtcgctgcctgagcagcggcctgacgttcacgacgtttcggtgcaaaaatgaacttgtccaggcaccataaaacgcccgtcaccagggttgcaatcaccaggatcagggcaaacatgttcgccatgccaactccttagggttatttgccgtctttaccaacgtgcagaatggcgaggaacgcttcctgcggcagctcaacgttaccgacctgcttcatacgcttcttaccttctttctgcttctgcagcagctttttcttacggctgacgtcgccgccgtagcatttcgccaggacgtttttacgcagctgtttcaccgtagagcgcgcgataatgtggttaccgatggccgcctgaatcgcgatatcgaactgctgacgcggaatcagatctttcatcttttccaccagctcgcggccgcgatacggcgcgttatcgttgtgggtgatcagcgccagcgcatcgacgcgctcaccgttgatcagcacatcgacgcgtaccatgttcgacgcctggaagcgtttgaagttgtagtccagcgacgcatagccgcgggaggtggacttcaggcggtcgaagaagtcgagaaccacttccgccatcggaatttcataggtcagcgccacctgtttaccgtggtaaaccatgttggtctgcaccccacgcttctcgacacacaaggtaatcacgttgccgaggaactcctgcggcagcagcatgtgacactcggcgatcggctcgcgcagctcctgaatattattcagcggcggcagcttggacgggctgtcgacgtagataacttctttggaggtggtctctacttcgtagactaccgttggcgcggtggtgatcaggtcgagatcgtattcacgctccagacgctcctgaatgatctccatgtgcagcaggccgaggaagccgcagcggaagccgaagcccagcgcggtagagctttccggctcgtagaacagagaggcatcgttaaggctcagtttgcccagcgcgtcgcggaaagcttcataatcatcggagctcaccgggaacaggccggcatacacctgcggtttcaccttcttaaagccaggcagcgctttgtctgccgggttgcgggcggcggtcagggtatcgcccaccggcgcgccgaggatgtctttgatcgcgcagaccagccagcctacctcgccgcatttcagctcggtacggtcaacctgtttcggggtgaagatgcccagacgatcagcgttatagacctggccggtgctcatgaccttgatcttgtcgcccttgcgcatggtgccgtttttaatccgcaccagcgacaccacgccgaggtagttatcgaaccaggagtcgataatcagcgcctgcagcggcgcgtccggatcgccttccggcggtgggatatcgcgcaccagacgctccagcacgtcggtcacgccgacgccggttttcgctgagcagcgcaccgcgtcgtgggcgtcgatcccgacgatatcttcaatctcgtccgctacgcgctcagggtcggccgcaggcaggtcgatcttgttgagtaccggaaccacttcgagatccatctccatggcggtgtagcagttggccagggtctgggcttctaccccctgcccggcgtctaccaccagcagcgcgccttcgcacgcggcaagagaacgggaaacttcataagagaagtccacgtggcccggggtgtcgataaagttcagctggtaggtctcaccgtcgctggccttatagtccagggtgacgctctgcgccttgatggtgatcccgcgttcgcgctcaagatccatggagtccagaacctgggcttccatttcacgatcagaaaggccaccgcaaatctggatgatacggtcagacagcgtcgacttaccgtggtcgatgtgagcgatgatcgaaaagttacgtatattcttcatatttagagttaattatgccttacgagtatcatgaggccgctgtactgtgcctgacgttttttaatccgaaaacgccgcattctacactacatccgcgaaaccaggaaatgctgttagatccagcatacccgcagaaattgtggcgttgtaacaggaaaggtaaataaagataagggccagtgaaatcactggcccatgtcggaggaaggcgtatcaacacgcagcagatccggcggcagtgcgacgttcaaaatcaccggctgccaggactgacgtgccgccagtcgcggcgacagaccgcgcgccaccaggaagccgccgacgccgcccagcagcgcgccgcaaagtgacgcaatatcgctggcaaacagcacctgaaaaatagacgccattacaaacagccccgccagcggcgccatatacaccagcatcgctgagcccagcaggctgctttcagcgatccccagctccactttttgccccgcggccaacggctgctcgcagggcacgctaatggtatggctggtctgcggccccagcttgtttagcacccggctaccacagccggcacgggaggcgcagctgctgcaggaggctttaacgtcgcagtgcacctgcgccacgccgttatgccaggaaaccacggtagcccactctttaatcattgtactgccttgaatttaatactgtcagagatacgcttcgccgtctgcggcggcagctcgcccactacggttatctccgcgttatcgcgcaccgtcgtgctgacggtgcgtcggccggtgcgcaacagctggtcgctgctggccgccgtggcgcggttgatattgatcgagaagctaaacaagccgtcggaatagagacgtgattctaccggaccgtcaaaggtgggaagacggcgctggctgctggaaacctcagtcacgccctgcgggagccacgtcggcgcccagttgaagttagctttgtcgcctccttcaggcaccgacagctgcggcggcaaattcgcttttgccagcgtctccatgctggcgctgacgttatcgccaacgttgaaggagacgacccggaactgctccagcgtttccccgtcgcggtcgagcaaatcgacgcgcagcggcagcttggtttcagcatccagccaggcgataaagctgtagcgcgtgccgtcgcgagccacgacgcggatcacgtcgcagaggcggtcagcgatacgggtacggcccacggagataaaatcatacgccgcggagaggcgtttgaaatcgctatataccagcgatggcagcgaatcgacgatatagtccccgttcagggtgaacggatcgagaccgggttcaaaatagctgatttccgtgccgcgcaggaccacttcccggcgcggaccgtccagctgcagcaactgcgccagcggttggttgttcagtcgcgcgtgacgatagcgcagcgactcaacgccttgtttgctgatgctaacaaaagacagctcataattgagagactggctggccaggttcatctgctgcaacaacgccccggacgatgtatcagccgaggcgttgacagagaacaacaggctgcctgccatgagcgacatggcacaccaaagttgcttcattactgcgattgcgttcctaaagtttgatagcccggtacctggactgcggcctgctgagtctgggcctggccaaactgaagctgctcagcgtgcaggcggcgctgcagttcgtagtcctgcagcatggcgttaattcggcggcgctgttcctggacctgcgcctgctggccgcttcccgctgacgcgtcagccggcacgccaagacttaccgggcttgctttacccatcatgggcagcgtattgaacaccggcgcttctggctgctgagcggaatcagactgaccattatagtgctggacgccgacgataaccgcaagcgatacacaggcggcaacgcccatttgagtcagggagctggcccacggacgtaccttgttccagaacggcatctgccgccactgatgcggtgcgggctgagattcaggaataagcggagccgtctgacgaacgggctcattttcaatggcggccatcacccgggcggagatatcaaattgcagcacctcagcggtatcgccacgcagcgtatcgcggataaggtgataactctcccaggttttttgcatctcagaagaacgactcagctcgttgagcagttcgttatccagcgtttcaccatccattaaagccgaaagtttttctttctgcatgcctgatacccttttccagtattccgctatcgtcaacgcctgataagcggttgaactttattatcaatagcttctcgcgcccggaagatacgcgaacgcaccgtcccaaccggacaatccatgatagcggctatctcttcatagctcaggccatccagctcccgtaacgtaattgccatgcgtaaatcttccgggagcgattcaatggtacgaaaaactatttgtctcagttcttctgacaacattaagttctcagggttcgaaatttctttcaacgccccgccgctttcgaagttttccgcctcgttggcgtcaacatcgctggacggcggacggcgcccctgagcaaccagataattcttcgccgtgttgacggcgatacggtataaccaggtgtaaaaagcgctatctccccggaaagagtccagcgcacgccatgccttaacgaacgattcctgaacaacgtcagcgatatcgcccggcggtacatagcgggaaaccaggctcgcgaccttatgctgatagcgcactaccagcaaattaaacgctttctgatctcctttctggacccgttcaacaaggacctgatccgttaactgctcgctcatccgaggtaatgtctccccaaacccaattcccatgcgtcttcaaaacaccacccaaaatctgcattatgagcaagctgactgttggagtgcatgaaaacaataaagttccgttacgctttttgttttttgtctggcaacggcggcagatcgttatcaatcattatatgcccaggttgctaaacgataggtaagtcaataagaaaaagcgcaggcccgtctgaagggtatcgtaacacgccgtttatttcactataaaatccaatgtcatcaaccttccccgcgtctcattttcagcgcgcaagacgccgtttccgttcgccttttgtttagccgtcacaacagcagacaaaaaaattgtacgattcctcacggaccggtgctattgtgagccaaatgtgtttagtaaattaaacaaagacaatgaataccactcctgacttctcttgtgatgtgttgattatcggcagcggcgctgccggtctttcccttgccctgcgcctggctgagcacagttcggtgaccgtgctgagtaaagggccgatcagcgaaggttcgacgttctacgcccagggtgggattgccgccgttttcgacgagacggacagtattgaatcccatgtcgaagataccctgattgccggcgcagggttatgcgatcgccatgcggtcaccttcgtcgccagcaatgccagatcatgcgtccagtggcttatcgatcagggcgtattgtttgacactcaggtccaggccaatggcgaagagagctatcatctcacgcgcgaagggggccacagccatcggcgcattctccacgccgccgacgctaccggcaaagcggtggagacgacgctggtcgataaagccctcgcccaccccaatatccgcatccttgagcgcagcaatgccgtcgacttgatcgtatcggataagattggcttgccaggcacgcgccgggtggtcggggcatggatctggaatcgtaataaagagcgggtggaaacctgcagcgcgaaagccgtagtactcgctaccggcggggccgcgaaggtttaccaatataccactaaccccgacgtctcttccggagacgggattgcgatggcctggcgggcgggatgtcgggtggcgaatctggagtttaaccagttccaccccaccgcgctatatcacccccaggcgcgtaatttcctgcttactgaagcgctgcgcggcgaaggcgcccaccttaaacgcccggatggcacccgctttatgccggactttgacgagcgcggcgagctggccccgcgcgatatcgtcgcccgcgccatcgaccatgaaatgaagcgcctgggcgtagactgtatgttccttgatatcagccataaacccgaggcgtttgttcgccagcatttcccgatgatttatgaaaagctgctcggcctgggaattgatttaaccaaagagccggtgccggtcgtccccgccgcgcattacacctgcggcggcgtgatggtggatgataatggccgcaccgacgtcgatggtttatacgccatcggcgaagtcagctacaccgggctgcacggcgcgaatcgtatggcgtcgaactcgttgctggagtgcctggtctatggctggtccgccgcggaggatattacccggcgcctgccgctcgcccagaaggtcgccacgctgccagcatgggatgaaagtcaggtggagatcccggatgaactggtggttatccagcacaactggcacgaactgcgcctgctgatgtgggattacgtggggattgtgcgcaccacccgcaggctggagcgcgccctgcggcgcattaccatgctccagcaggagctggatgagtattacgcccgcttccgcgtctcgaataatttgctggaactgcgcaatctggtgcaggtggcggagcttatcgtacgctgcgcgatgttgcgtaaggagagccgcggtctgcattataccctcgactatccgcagccgctgcctgacagcggcccgtcgatactctcgcccctggctcacataaagagataaaagtcctcggtcagagcggtaaagccttccgaatattgctgctctggcccgcggatcgccagcctgtcgctgaaacactcccctgccgtcggggagaaagccagcagcacccgatgcggcggtcgcagctcggtctccgccacgtcagtacgcagtcgcagatgccagcccatcgcccttgcccgttcgatgaacgcattaccaatatccaccggcaacaccacgcaaaaaaaaccttcttcggtaatatgctctgcggcacaggtcagcagggaggcgtgatcgagcgtagtggtgtaccgcgcctgctctcgctgcgaggtcgcgcatggcacgccttcggcaaaaaagggcggattactgattatcagttcatagcgtcgagtttgcgacggctgccactgatgaatatcggcctgccagacctcaatccgcgaagcccacggcgacgcgagggcgttttcccgcgcctgagcggcggcctcttcgtccagttctaccgcctcgacatgcacatcatctccggtacgctgcgcgagcatcagcgccagcaagccgctgcccgcgccaatatccagcacatgcttcactccggcaatcggcgcccaggcgcccagcaaaatgccgtcggtacccaccttcatggcgcagcgatcgtgagcgacaaagaaccgtttgaaggtaaaaccattgcgcggcagcgcaaacttcgactgagacatcctcaataaccttgccgacaaaaactcctgaacctaaggctatgcacaataccggagaacagatagccttacaaacagatgaacattacgtcagtaacgtctataatcggcggcccactcagaggtagaacatgactgtaacgactttttccgaacttgaactcgacgaaaacctgctggaagccctccaggataaaggtttcactcgcccgacagccattcaggccgccgctattccgcctgcgctcgatggccgtgacattctcggttcagcgccgaccggcaccggtaaaacggcggcgtatctgctgccagcgttgcagcacctgctcgatttcccgcgtaagaaatccggcccgccgcgcattcttatcctgacgccgacccgtgagctggcgatgcaggtggccgaccacgcccgcgagctggcgaagcatacccatctggacatcgccaccattaccggcggcgtggcgtacatgaaccacgcggaagtgttcagcgaaaaccaggacatcgtagtcgccaccaccggtcgcctgctgcaatatattaaagaagagaatttcgactgccgcgccgtcgagaccctaatcctcgatgaagccgaccgcatgctggatatgggttttgcccaggatatcgaaaccatcgccggtgaaactcgctggcgcaagcagactatgctgttctccgcgacgctggaaggcgatgcgatcaaagacttcgctgagcgtctgctggaggagccggttgaagtttccgccaatccgtcaacccgcgagcgtaagaaaatccatcagtggtactaccgcgccgacgatatcgaacataaaaccaaactgctggtgaatctgttgcaacagccggaagccacccgcgctatcgtgtttgtgcgtaagcgcgagcgcgtgcatgagctggctaactggctgcgtgaggccgggattaacacctgctggctggaaggcgagatggtgcaggccaagcgaaacgaagctatcaagcgcctgaccgacggccgcgtcaacgtgctgatcgccaccgacgtcgctgcccgcggtatcgatattccggacgtcagccacgtctttaacttcgatatgccgcgtaccgcggatacctacctgcaccgtatcggtcgtaccggccgcgccggtaaaaaagggaccgccatttctctggtcgaggctcatgaccacctgctgctgggtaagattggtcgctatattgaagagccgttgaaagccagagttatcgatgaactgcgcccgacgacccgtgcgccgagcgagaagctgacgggtaagccatcgaagaaagtgctggcgaagcgtgcgcagaagaaaaaagatgaaaaagagaaaccgcgggtgaagaagcgccaccgcgatacgaaaaatatcggtaagcgccggaagccaagcgcggccgggacgccatcagcgtccagcgatgagtaaaaaaaacgccgggatatcccggcgttttcacatctggcgttagccttacaggctttcggtaaaggtacgggcgataacgtcgcgctgctgttccggcgtcagagagttgaagcgtaccgcgtagccggaaacacgaatggtcagctgcggatatttttccggatgctcaaccgcgtccagcagggtttcgcgacgcagcacgttaacgttcaggtgctgaccgccttcgacgcgcacttccggtttcacgtccaccgggatttcacgatattcgatttcacccagtttgcttaccgcaaccacatcatcttccgcaaaaccacctttggcgcacaggcagcgcgcttcgcctttttcgctatccagcagccagaaagagttgagcaggtcgtcgtttgccgctttagtaatttggataccagtaatcatttgatgcctcccaggcagtgtttattcgattttggcctcttcgcggccaattggtaaaaccattgttgtatgagtgtatatatatcagccgcaccctcggcattccttgatataaatcaataaaaaccactcacccaacgtgggtataggaggtttttattgttttacatcaagttacgccattgtgagctataaataattttgtaaattttcaatttttttttgcataaaagccggcatcaggccgtgccgattttgttctatagaaagaagccgttaagctatagcgatgacccttttgcaggagagcaagatgaccacccctttaacctggcatgacgtgctggcggatgaaaagcaacaaccctattttctcaatactctgaagaccgtcgccgaagagcgccagtcggggatcaccatctatccaccgcaaaaagacgtcttcaatgcgtttcgctttactgaactgggcgatgtcaaagtcgtcattctcggccaggacccctatcacggcccgggtcaggcccatggtctggcgttctcagttcgtccgggcgtcgcgatcccgccttcgttgctgaatatgtataaagagctggaggccacgatccccggctttacccgccccacccacggttatctcgaaagctgggcacgacagggcgtgctgctgctgaatacggtcctgaccgtccgcgccggacaggcgcactcgcacgccagtctgggctgggagacctttaccgataaggttatcgctttaatcaatgagcattgcgagggagtagtttttctgctgtggggctcccatgcgcagaagaaaggcgcgattatcgatcgtcagcgccactgcgtgctgaaggcgccgcatccatcaccgctctctgcgcatcgcggcttctttggctgcaaccatttcgtacagaccaaccagtggctggttgaccgcggcgaaacgccgatcgactggatgccggtccttcccgctgaaagcgagtgattgacagccataaaaaaagccagcatcagctggcttttttgcattcaggcaggcgaatcacgccttgttctgacgccaccattccgccagcaggacgccggtcgccacagagacgttcaggctttcaacgttgccggtaccgtcgatggcaacgctgagatcggcgctggaaatcgccgcatcggacagaccatcacgttcctggcctaacgccagcaccattttcttcggcagctcggctttaaacagcggggtaccattatggctggacgttgagacaatcgcgtagcccgctttgcggaactgatcgagggtatcgataaagctgtcgccggtgatcggttcaacatgctccgcaccgccctccgccgtacggatcgccgccccggactccagcacgccggcatcctgaaccaccacgcccttcacgccaaagtgcgcgcagctgcgcatgatcgccccgagattatgtgggttacccacatcttccagcgccagaacgcaatcttcttccccggccttcgcgacccattgagcaacagaagtgccgtggcgttttttgatcaggaagcagacgccgccgtggtgctcggtgccggaggctttcgccagctcggcttcgtccaccacgtgataggccttacggttggccgccatccagcgcagcgcctctttaaagcgcggcgtcacgctctgaataaaccaggcgcgaacgatagcttccggacggctctggaacagcgcctggcaggcgttttcgccatatacgcgggtctcttccgcacgctgacgacgcagcacttccggatcgataaagctcttcccgctgatcccgccgtgatcttcttttaccggcgtctcatcgccaggagcgcgggaaacggtacgccacggagacgcatcgtcgcgatgaaaatcatcgcgtttgcgatcgtcacgcttacggtcgtcacgtttgcgatcgtcgccgcggctgtttcgttcgtcacgcgcagggcggctgcggccgtcaacacgagattttcctggacgacctccccctttcccggtacgtgggttatgggtgcgtttgtcagaatcatcatcactgcggacatacatcactttgaccttgccgcttttatttttcagttcgtcgctcatcaattttctccacctgcgctgcgcgaagcgcgcagattacccgatgtgccatcgcttcgccatgatttcgtttaaaagccggcctctattgcactcatcgaacaaaacgcattgtcctcaaataacacttcatcgataatatgtaacatcacagaaacatatcggccacgtgccacgttgcaacccataaccagaggttagttatgaataccgtttgtgccagttgtcaggctctgaaccgcctcccggacgatcgtagcgcggatggcgcaaagtgcggacgctgcggtcacgatctttttgacggcgacgtcatcaacgcgaccggggcaacgctggataaactcttgaaggacgatctgccggtcgttgtcgatttctgggcgccatggtgcggaccctgccgtagcttcgcgccgatctttgaagacgtcgcggaagagcgtagcgggaagatgcgttttgtgaaagtcaacaccgaagcggaacgtgagcttagcgcccggtttcgtatccgcagcatcccgaccattatgatgttcaaaaatggcgaagtgatcgacatgctcaatggcgcagtgccaaaagcgccattcgatagctggcttaacgaagccggccaacaataacccttccggggcaccgcttgtgccccgttttcacctctgcgacaatagcgtttttcactagcgactcccatgactgataacgctgtccttcgcctgcgcgccgaacgtctcgcgcgagctacccgccctttccttgcgcgcggcaatcgcatccgccgctgccagcgctgtctgctgccgctcaagcagtgcctgtgcgccacgttaacctcagcgcaggccgccagccgcttctgcctggtgatgtttgatacggaaccgatgaagcccagcaacactggccggctcatcgccgatattctgccagataccgaagcgtttcagtggtcgcgtaccgaaccgccgcaggcgctgctcgatctggtcgcccatcctgattatcagcccatggtcgtatttccggcctcctatgccgggccggatcgccaggtcctgagcgcgccgccgtccggtaaaccgccgctgtttatcatgctcgacggcacctggaccgaagcgcgcaaaatgttccgtaagagtccttatctcgacgcgctgccgattatctccgtcgatctgtcgcgcatctctgcctaccatctgcgcgaggcgcacgccgacggacaatattgtaccgcggaagtggccatcgccctgctggatctggcgggcgatgccccggccgccgctgcgcttggcgagcacttcacccgcttccggacccgctatctggcgggaaaaacccagcataagggcagtatcacagcgggccaggtggaaaacgtttaaaatcattcggtcactgggatgaaaggagaccggtatgagccaacgaggcctggaagcgctgctgcgaccaaagtccatcgccgttattggcgcatcaatgaagccgcagcgcgctggctatctcatgatgcgcaacctgttagccggcggcttcaatggcccggtgatgccggtcacccccgcctggaaggcggttcttggggtactggcatggcctaccatcgagagcctgccgtttaccccggatctggcggtgctctgtactaacgccaggcgtaatctcgaattgctcgaagccttagggcaaaaaggctgcaagacctgcatcatcctctcttcgcagccggaacagtacccggcgctgctcgaatgcgccgcgcgctatcagatgcgtctgctcggccccaacagtctcggactgctggccccatggcaagggctgaacgccagcttttcaccggtgccgatccatcgcggtaaactggcctttatctcgcagtcggccgccgtctccaatactatccttgactgggcgcaacagcgcgagatgggtttttcctacttcatcgccctgggcgatagcctggatattgatgtcgatgacctgctggactttctggcccgcgacagcaagaccagcgccattttgctgtacctcgagcatctcagcgacgcgcgccgctttgtctccgccgcgcgcagcgcttcgcgaaacaaacctatcctggtgattaaaagcggccgtagtccggcggcgcagaagctattgcacgccaattccgggatggacccggcatgggatgcggccattcagcgcgctggtctgctgcgggtgcaggatacccatgagctgttctctgcggtggaaacgctcagccacatgcgcccgctgcgcggtgaaaaactgatgatcgtcagcaacggtgcggcgccggcggcgctggcgctggatgagctttggttgcgaaacggtaagctggcgactctcagcgaggagacgcgcgacgccctgcgtcaggcgttgccggttggcgtggagatcgccaacccgctggatctacgcgatgacgccagtagcgaacactatcagcgggcggtgaatgttttgctcaacagtcaggattatgacgcgctgctggtgatccactctcccagcgccgccgcgccgggcaccgagagtgccctggccctgattgacgctctgaagcatcacccgcgcggtaaatatgtcaccgtgctgaccaactggtgcggcgaattttcctcgcaggaagcgcgacgtttattcagcgatgccggcctccctacctaccgtacgccggagggcacgatcaccgcttttatgcatatggtggaataccgtcgcaaccagaaacaactgcgcgagacgccggtgctaccagactccttaaccgccaataccagcgaggcgcatgctctgctgcagcaagcgatagatgacggcgccaccacgctggatactcacgaggtcagcccggtgcttcgggcctatggcatccacacgctgccaacctggattgccgctgacagcgcggaagcggtgcatatcgctgagcagataggctatccggttgcgctgaagctgcgttctccggatatcccgcacaaatcagaagtacagggggtcatgctctatttgcgtaccgccgccgaggtgcagcaggctgcagatgcgatgatcgatcgcgtcaaactggcctggccccaggcgcgcattcatggattgctggtgcaaagcatggccaatcgcgctggcgcccaggagctaagagtagtggttgagcacgatcccgtcttcggcccgttgattatgctgggcgagggcggcgtggagtggcgggccgaggaccaggccgccgtggcgctgccgccgctgaatatgaacctggcgcgttatctggtgatccaggcgatcaaaaataagaagatccgcggccgcagcgccttgcgcccgctggatatcgctggcttaagccagctgctggttcaggtctcgaacctgatcgtcgactgcccggagatccagcgcctggatattcatcccctgctcgcctccggcaacgagtttacggcgctggacgttaccctggggcttgctcccttcagcggcgacagtgaaagccgtctcgctattcgtccctatccgcaccaactggaggagtgggtggtgatgaaaaatggcgatcgctgtctgttccggccgatcctcccggaagatgagccacagttgctcgcatttatcgcccaggtcaccaaagaagatctctattatcgctattttagtgagatcaacgaatttacccatgacgacttagccaatatgacccagatcgactacgatcgagaaatggcgttcgttgccgtcaggaccagcgcagagaagagcgagatcctcggcgtgacgcgggcgatctccgatcccgataatattgacgccgagtttgccgttctggtccgttcagatttaaaagggttaggcctggggcgaaggttgctggaaaagctgatcgcctatacgcaaagccatggcctgcagcgccttaatggtattacgatgccaaataaccgaggcatgataggcctcgccagaaagctgggattcaccgtcgatattcagctggaagatgggattgtcagcctgtcgctgcccctgaatcagggataatcgcgcgacgctgaccgcaattgttgaccacattagcgggtagtaatggtattattgcccgcttacgtcgtctgcatggtacagaagacccttcaataaacagagaagaaacgcactgtgatgttgtcaaaatttaagcgtaataaacatcaacaacaccttgcccaactccctaagctttctcagtcagttgatgatgtagagttcttttacgcccctgcggaattcagggaagcgttactgacccggattgcccacgccactcagcgtatatgcattattgcgctctatctggagcaagatgatggcggaaaaggaattttgcaggccctttatgacgccaaacgccagcgtccggaactggatgtccgcgttctggtggactggcaccgcgctcagcgtggccgtatcggcgccgccgcctctaataccaatgccgactggtattgtcggatggccaatgaaaatccaggggtagatatccccgtttacggcgtgccgattaacacccgggaggcgctcggcgttctccatttcaaaggctttattattgatgactgcgtcctctacagcggcgccagcctgaatgatgtttatctgcatcagcatgataagtatcgctatgatcgctatcagtgcatccgtaacggcaaaatggcggacatcatgttcgactgggtcgacaacaatctggttcaggggcgcggcgttaaccgtctcgacagaccggatcggccaagaagcccggaaatcaaaaacgacattcgccagtaccgtcaggagctccgcgaccgcagctaccattttgtcggcaccgctggtgacgaagaactctccgtcaccccgctggtaggcctgggtaaatcgagcctgctgaataaaaccatctttcacctgatgccctgtgccgaacacaagctgacgatctgcaccccctacttcaacctccctgccgtactggtaagaaatatcatccagctgctgcgcgatggaaaacaggtggagattattgtcggcgataaaacggctaacgatttctacattcctgaagatcagccgtttaaaatcatcggcgcccttccctatctgtatgagatcaacctgcggcgtttcctcagccggctgcagtattatgtcaataccgatcagctgatcgtccgcctgtggaaggatgacgataacagctaccacctgaaaggcatgtgggttgacgatgagtggatgctgctcactggcaacaacctgaacccgcgcgcctggcggctcgatctggaaaacgccattctgatccacgatccaaagcggcagctgggggccatgcgggagaaagagctgaagctcatccgcacccacaccacggtagtgaaacattatcgggatctgcaaagtatcgccgactatccggtgaaagtgcgaaaactgatccgccgtctgcggcggatccgcattgaccggctgatcagccgtattctctgactatcagccccgcctcgacggggcttttttctggaagcgctatgcgtacgataatagtgattgcttcgctgctgttaaccggctgtagccacatggcaaatgatgcatggtccggtcaggacaaagcccagcattttctggcctcagcgatgctctctgccgctggcaatgaatatgcgcaacatcagggttacagccgggaccgcagcgccgctatcggcctgatgttttccgtcagccttggcgcctcaaaagagctttgggacagccgcccggctgggagcggctggagctggaaggattttgcctgggatgtcgccggcgcgaccaccggctacgctgtatggcagttggctcatcagtaagcgttacagacgcaaccccttccctttgcgatgcaacatcagggagacaaggaaggcaatggcggccatcaccgtcacataccagtagaacgcgtgctctatccctgccgacttaagcgacagcgcgacgtactccgcagagccgccgaacaatgcgttcgcgacggcataggacaacccgaccccaagcgcgcgaacctgagccgggaacatctctgctttcaggatgccgctgatcgaggtatagaaactgacaatcagtaaggcgcagatcaccaggccgaaggcggcatagggtgagctcactttttgcaaggcgctgagaataggcacggtaaataacgtcgccagcacgccaaagcacagcatggaggtccggcggccaactttatccgagaaggcgccgaatagcggctgaaccagcatataaacgaacagcgccgcggtcatgatcacgctggcggtgctggccgtcatgcccgccgtgttgaccagatacttttgcatataggtggtgaaggtgtagaaggtcagcgatccggcggcggtaaagcctaacaccatcgcaaaggcccggcgattgcgccacaacccttttaatgagccagcctctttcagcgcccgggtctcctgcttcgaggtttcgtccagctggcgacgcagccacagcgcgacgatagccagtaccgccccgagggcaaaaggaatacgccatccccaggcatggagatcttcatcgctaagcacctgctggagcgccacaaccactaatacagccagcagttgaccaccaatcagcgtaacgtactggaaggaggcatagaagcctttctttccctccaccgcgacttcactcatataggtcgcactggtgccgtattctccgccaacagacagcccctggaacagacgcgccagcagcagcagcgccggggcccaggtgccgatcaccgcataacccggcagacaggcaatcaccagtgagccaaagcacatcatgcagaccgagataagcatggacgttttacgtccccggcggtcagcgatccgaccaaacagccatccaccgataggacgcatcagaaatccggcggcaaatacgcctgccgtttgcagcagttgggtggtggtatttccggatggaaagaagatgtgcgcgaaatagagcgagcagaatgagtaaacgtaaaaatcaaaccattcaaccagattccccgaggaagcgccaacaattgcccaaatacgacgacgggtatcggccagttccggcgcgccccgttcggtaatgctactttctgtcattgttatattgctccagcaaagactgcaatctgtcttgtcgggcgtaccacgtcacgcagacaaattaattagtaaactaaatgttatataattgttatacttttatatgtgattggattcacattttttttcgcaagcacggttttcgcgatcatcgccagcgcaggggcagggaaaaagtggattatggcgaagggattgccatgacggggttttattttgcgttgaaaggagataatggagcgaacatggcgtaattttcgccggaggcggtgctgcgcactttgtccggggtacggttttgtagccccggtaagcgcagcgccaccggggagacataccggcacgctggccggacgacagaaacgcaaaaagcccatccggcaggatgggctcttcacttgtttgatgcctggcagttccctactctcacatggggagaccccacactaccatcggcgctacggcgtttcacttctgagttcggcatggggtcaggtgggaccaccgcgctagtgccgccaggcaaattctttgtgctcgtcctgtgtcttttgcgctcatactgcgttggctgctctcgcgagtgtcagtcacatacttatgtatgctccttccatcgcgtcgtttgccgccttgtctcagcgcaaaatccttcggactctgaatcagagctgaaaattctctcaaatcgccaaaacatcttcggcgttgtaaggttaagcctcacggttcattagtaccggttagctcaacgcatcgctgcgcttacacacccggcctatcaacgtcgtcgtcttcaacgttccttcaggagacttaaagtctcagggagaactcatctcggggcaagtttcgtgcttagatgctttcagcacttatctcttccgcatttagctaccgggcagtgccattggcatgacaacccgaacaccagtgatgcgtccactccggtcctctcgtactaggagcagcccccctcaattctccagcgcccacggcagatagggaccgaactgtctcacgacgttctaaacccagctcgcgtaccactttaaatggcgaacagccatacccttgggacctacttcagccccaggatgtgatgagccgacatcgaggtgccaaacaccgccgtcgatatgaactcttgggcggtatcagcctgttatccccggagtaccttttatccgttgagcgatggcccttccattcagaaccaccggatcactatgacctgctttcgcacctgctcgcgccgtcacgctcgcagtcaagctagcttatgccattgcactaacctcctgatgtccgaccaggattagctaaccttcgtgctcctccgttacgctttgggaggagaccgccccagtcaaactacccaccagacactgtccgcaaccccggtaaggggccaacgttagaacatcaaacattaaagggtggtatttcaaggttggctccacgcagactggcgtccacgcttcaaagcctcccacctatcctacacatcaaggctcaatgttcagtgtcaagctatagtaaaggttcacggggtctttccgtcttgccgcgggtacactgcatcttcacagcgagttcaatttcactgagtctcgggtggagacagcctggccatcattacgccattcgtgcaggtcggaacttacccgacaaggaatttcgctaccttaggaccgttatagttacggccgccgtttaccggggcttcgatcaagagcttctccttacggataaccccatcaattaaccttccggcaccgggcaggcgtcacaccgtatacgtccactttcgtgtttgcacagtgctgtgtttttaataaacagttgcagccagctggtatcttcgactggtctcagctccacccgcaggggcttcacctacacaccagcgtgccttctcccgaagttacggcaccattttgcctagttccttcacccgagttctctcaagcgccttggtattctctacctgaccacctgtgtcggtttggggtacgatttgatgttacctgatgcttagaggcttttcctggaagcagggcatttgttacttcagcaccgtagtgcctcgtcatcacacctcagccttgattatccggatttgcctggataaccagcctacatgcttaaaccgggacaaccgtcgcccggctaacatagccttctccgtccccccttcgcagtaacaccaagtacaggaatattaacctgtttcccatcgactacgcctttcggcctcgccttaggggtcgactcaccctgccccgattaacgttggacaggaacccttggtcttccggcgagcgggcttttcacccgctttatcgttacttatgtcagcattcgcacttctgatacctccagcaaccctcacaggtcaccttcgcaggcttacagaacgctcccctacccaacaacacatagtgtcgctgccgcagcttcggtgcatggtttagccccgttacatcttccgcgcaggccgactcgaccagtgagctattacgctttctttaaatgatggctgcttctaagccaacatcctggctgtctgtgccttcccacatcgtttcccacttaaccatgactttgggaccttagctggcggtctgggttgtttccctcttcacgacggacgttagcacccgccgtgtgtctcccgtgataacattcttcggtattcgtagtttgcatcgggttggtaagtcgggatgaccccctagccgaaacagtgctctacccccgaagatgagttcacgaggcgctacctaaatagctttcggggagaaccagctatctcccggtttgattggcctttcacccccagccacaagtcatccgctaatttttcaacattagtcggttcggtcctccagttagtgttacccaaccttcaacctgcccatggctagatcaccgggtttcgggtctataccctgcaacttaacgcccagttaagactcggtttccctgcggctcccctatacggttaaccttgctacagaatataagtcgctgacccattatacaaaaggtacgcagtcacacccgaaggtgctcccactgcttgtacgtacacggtttcaggttctttttcactcccctcgccggggttcttttcgcctttccctcacggtactggttcactatcggtcagtcaggagtatttagccttggaggatggtccccccatattcagacaggataccacgtgtcccgccctactcttcgagttcacagcctgtgcattttggtgtacgggactatcaccctgtaccgtcggactttccagaccgttccactaacacacaagctgattcagactctgggctgctccccgttcgctcgccgctactgggggaatctcggttgatttcttttcctcggggtacttagatgtttcagttcccccggttcgcctcgttaacctatgtattcagttaacgatagtgtgacgaatcacactgggtttccccattcggacatcgccggttataacggttcatatcaccttaccgacgcttttcgcagattagcacgtccttcatcgcctctgactgccagggcatccaccgtgtacgcttagtcgcttaacctcacaacccgaagatgtttcacttctgattgcgaaaatttgagagactcgaacacacattaactgtgtgtcgtttcaattttcagcttgatccagatttttaaagagcaaatatctcaaacgtcacccgaagatgagttttgagatagttcggcacgcgtctttcactcacgaaccagcaagtggcgtcccctaggggattcgaacccctgttaccgccgtgaaagggcggtgtcctgggcctctagacgaaggggacactgaagtctcaatcgcaagacgccttgcttctttacgttcatcagacaatctgtgtgagcactacaaaggcaggttctttaaggtaaggaggtgatccaaccgcaggttcccctacggttaccttgttacgacttcaccccagtcatgaatcacaaagtggtaagcgccctcccgaaggttaagctacctacttcttttgcaacccactcccatggtgtgacgggcggtgtgtacaaggcccgggaacgtattcaccgtagcattctgatctacgattactagcgattccgacttcatggagtcgagttgcagactccaatccggactacgacatactttatgaggtccgcttgctctcgcgaggtcgcttctctttgtatatgccattgtagcacgtgtgtagccctggtcgtaagggccatgatgacttgacgtcatccccaccttcctccagtttatcactggcagtctcctttgagttcccggccggaccgctggcaacaaaggataagggttgcgctcgttgcgggacttaacccaacatttcacaacacgagctgacgacagccatgcagcacctgtctcacagttcccgaaggcaccaatccatctctggaaagttctgtggatgtcaagaccaggtaaggttcttcgcgttgcatcgaattaaaccacatgctccaccgcttgtgcgggcccccgtcaattcatttgagttttaaccttgcggccgtactccccaggcggtcgatttaacgcgttagctccggaagccacgcctcaagggcacaacctccaaatcgacatcgtttacggcgtggactaccagggtatctaatcctgtttgctccccacgctttcgcacctgagcgtcagtctttgtccagggggccgccttcgccaccggtattcctccagatctctacgcatttcaccgctacacctggaattctacccccctctacaagactctagcctgccagtttcgaatgcagttcccaggttgagcccggggatttcacatccgacttgacagaccgcctgcgtgcgctttacgcccagtaattccgattaacgcttgcaccctccgtattaccgcggctgctggcacggagttagccggtgcttcttctgcgggtaacgtcaatcgccaaggttattaaccttaacgccttcctccccgctgaaagtgctttacaacccgaaggccttcttcacacacgcggcatggctgcatcaggcttgcgcccattgtgcaatattccccactgctgcctcccgtaggagtctggaccgtgtctcagttccagtgtggctggtcatcctctcagaccagctagggatcgtcgcctaggtgagccgttaccccacctactagctaatcccatctgggcacatctgatggcatgaggcccgaaggtcccccactttggtcttgcgacgttatgcggtattagctaccgtttccagtagttatccccctccatcaggcagtttcccagacattactcacccgtccgccgctcgtcacccgagagcaagctctctgtgctaccgctcgacttgcatgtgttaggcctgccgccagcgttcaatctgagccatgatcaaactcttcaatttaagtttgatgctcaaagaattaaacttcgtaatgaattacgtgttcactcttgagacttggtattcatttttcgtccgaggacgttaagaatccatgtcactttgagtgcccacacagattgtctgataaattgttaaagagcagttgcgacgcgctttagcgctctgtcgcgaggtcccgtataatacgttttcctcattcagagtcaagcgcttattttgctttcctctgtcggctttcaacgtcgatttccgtcgttgaatcctcttggcccggcggcttgtttgccgttgttccgtgtcagtggaggcgcattatagggggtaattctgaagtgacaaggataaattcaaaaaaagaattcaaccgctcacttttcaaccaaatcaggtattgagctttaattcttgcctggtttttaaacaaaaacgagcccgctgggcccgtttttgtcgttttgtgatttactgcactgccacaatgcggtcgtcttttactaccagctcgatggttttacccggaaccagctcaccggaaaggatctgctgggctaacgggttctcaatctgctgctgaatagcacgtttcaatggccgcgcgccgtataccggatcgtaaccattggcgctcagcagcttcagcgcctcatcggacatctgcacttcatatccgcgctcttccagacgtttatacagacgctgcagctggatctgggcaatagaggcaatatgtttctcgcccagcggatggaagaccaccacttcgtcgatacggttgatgaactccggacggaagttctggctgactacccccagcaccaggtccttcatatgtccgtagtccagctcgccgaaccgttcctgaatcagatcggaaccgaggttcgaggtcatgatgactaccgtattacggaagtcgaccgttctcccctgcccgtcggtgagacgcccgtcgtcgagtacctgcagcagaatgttgaacacatccgggtgcgctttttccacttcatccagcaggatgacggaataaggacgacggcgcaccgcctcggtcaggtaacctccctcttcatagccgacgtatcccggaggcgcaccgaccagacgcgagacggagtgtttctccataaactcggacatatcgatacgcaccatcgcgtcgtcgctgtcgaacataaagttagccagcgttttacacagctcggttttaccgaccccggttggaccgaggaacaggaacgaaccaatcggccggttcggatcggacagcccggcgcggctgcggcgaatggcgttggataccgcttcaaccgcctcatcctggccaatcacccgatgatgcagctcctgctccatacgcagcagtttgtcgcgctcgctttccatcatgcgggagaccgggataccggtccagcgggccagcacttcggcgatttcagcatccgtcactttattacgcagcagacgcatggttttcccttcggactgagtggccgccgccagctgtttctccagttccggaattttgccgtactgcagctcggacatccgcgccagatcgccgacgcggcgcgcctgttcgatggcgattttcgcctgctccagctcagctttgatggtctgggtgccggagagcgacgctttttccgctttccactcttcttccagcaccgagtactgccgttctttatccgccagctcctcgttgagcatatcaagacgcttcaggctcgcctcatcagactctttcttcagcgcctgctgttccagtttcagctggataatacgccgatcgaggcggtccagctcttccggtttggagtcaatctgcatacggatgctggatgccgcctcatcgatgaggtcgatggctttatccggcagctgacggtcggcaatatagcgatgcgataaggtcgccgccgccacgatagccgggtcagtgatctgcacgtggtggtgcagctcataacgttctttcagaccgcgcagaatcgcgatggtatcttctaccgaaggctcggcgacgaacactttctggaagcgacgttccagcgcggcgtctttttcgatgtactgacggtattcatcaagcgtcgtcgccccgacgcagtgcagttcaccacgcgccagcgccggcttcagcatattacccgcatccatcgcgccgtcggctttaccagcgcccaccatggtatgcagttcgtcgataaacagaatgacgttgccttcctgttttgacaggtcggtcagcacgcctttcagacgctcttcaaactcaccgcggtatttcgccccggccaccagcgcccccatatccagcgccaatacccgacggcctttcagcccttctggtacttcgccgttgacgatacgctgcgccaggccttcgacgattgccgttttacccaccccgggttcaccgatcagcaccgggttgtttttggtacgacgctgcagtacctgaatggtacggcgaatctcttcatcacggccgatcaccggatccagcttgccctgctcggcacgctcggtgagatcgacggtaaatttcttcaatgcctgacgttggtcttcggcaccctgatcgttcacgctttcccctccgcgcatttgttcaatcgcctgagtcacgttggcggttgttgctccggcggattttaaaaggtcggtcagcgtaccgcgtgattcaagcgccgccagaacgaacagttccgacgaaataaagttgtcctttttcttttgcgccagcttgtcgcaaaggttgaggatccgcactaaatcctgagaaggttgcacatcgccgccggtgccttccacctgcggtaaacggctcaaggcctgttcgatgtcagtgcgcagtttcccggcattcacgcccgccgaggttaataaaggacgtaccgatcccccttcctgattcagcaaggcgctcattaaatgaagaggttcgatgaattggttgtcgtgcccgagtgcgagcgactgggcatcggcaagagcaagctggaatttattggtaagacgatccagacgcataactcctcccataaacaggtcaaatttgctactggagattaaatgaggtcatccctcaattattcaaggttaaagacccgaactatgtgaaaaataagtttgccttctggatcgtcttgattctctaggttatatcagccaaatgaaacttgccatacgaccggtggtcttgtcgcgccggtaagagaaaaaatcatccttttcgcttagcgtgcagcgatcgccgccgaaaatcagctcaacgccgacgtttgccagacgctgccgcgccagttggtagatatcagcaaaatatttttcgcctgccggacgaaaagcccggtgcgcattcttgtccttcgccataaaggcatcccggacttccggtcccacctcaaacgcctgcggaccgatggcgggccccagccacgccataatattttcggctttatcggcgaaacgagcaaccgtcgcttccagaaccccttcgcataagccgcgccatcccgcgtgcgccgcggcgacttcggtgccgtcgcggttacagaacagcaccggcaggcagtcagcggtcatcaccgcgcagacggtccctggcgtacgactataagaagcatccgcgcgtttcgacggatagggtccgccgtccagcgtcagaacctcggtgccatggacctgctccagccaaaccgggtaagacggcaagccgccggcggcaaacatccgccgccggttttcttcgacatcctgcagattgtcgccgcaatgggcgcccaggttgagcgagtcatagggcggcagactcacgccgccgatgcgggtagaactacaggccgccacgctgccgggcattggccactgcggtacaatcagtttcgtcataaccagtcaatatcgtccttatgggcttcaaaatcggcgcgcatcgcctcgatgagctcgaccatatcctgcgggatgggcgcgtgccactccatttcaatgccggagatcgggtgatacaggcgcagcatggtggcatgcagcgcctggcggtcgaatttacgcagcgcggtgatgaactcctccgacgcgcccttcggcggacgcggccggccgccatagacctggtcacccaccagcggatgggtgatatgcgacatatgcacgcggatctgatgtgtacgaccggtttccagacgcagacgcaggcgggtatggatgcggaaatgttccataatgcggtagtgggtcaccgccggtttgcccatcggatgcaccgccatatgggtacgcttggtcgggtgacggctgatcggctcttccactgtgccaccggcggtcatatgaccgatcgccaccgcttcgtattcacgggtgatctcgcgcaactgcagcgactccaccagccgggtttgcgccggaatggttttcgccaccaccatcagaccggtggtgtctttatccagacgatgaacaatacccgcgcgcggcacatcggcaataggcggatagtagtgcagcagcgcattcagcacagtaccgtcagggttgcccgcgccaggatgtacaaccagatcgcgcggtttattgatcacgatgatgtcatcatcttcgtaaacgatattgagcggaatatcctgcggctggaagcgcgcctcttcttcgatttccacatcgatagcgatgcgttctccccccagcactttttctttcggtttatcgccaatggtgccattgactaatacgcgttggtcgaggatccattcttttatccgcgatcgcgaataatcagggaacaattcggccaaagcctgatctaagcgttgaccgagttgattttcggtcaccgttgcggtgagttgtactcgttgtgccatatacagcttcttcgtttaacgttgggttttacggctttgccgtttaatatagtgtgctattgtagctggtcttaatcgggagcaggaacagagattctcccgcataaacattttgaggaagtcaaaacgtcatgacgcgcatgaaatacctggtggcagccgccacactgagcctggctttggtgggttgctccggctctaaggaagaggtgcctgataatccgccgaatgaaatctacgcgaccgcccagcaaaaactgcaggacggtaactggaaacaggcgataacgcaactggaagcgttggataatcgttatccattcggcccttattcccaacaggtacagctggatctgatttatgcgtattataaaaacgccgatcttcctctggctcaggcggctatcgatcgcttcatgcgtttgaaccccacccatccgaacatcgactatgtcatctatatgcgcggcctgaccaacatggccctggatgacagcgccctgcagggcttcttcggcgttgatcgctccgaccgcgatccgcagcacgcgcgcgatgccttcaatgacttctccaaactggtgcgtggttatccgaacagccagtacgccactgacgcctataaacgcatggtgttcctgaaagatcgtctggccaaatatgagctgtcggtcgtggattactacaccgatcgtggcgcatgggttgccgtggttaaccgtgtggaagggatgatgcgtaattatccggatacccaggccacccgcgatgccctgccgaagatggaaaacgcctatcgtcagatgcaaatgaacgctcaggcggacaaagtcgcgaagattatcgccgcgaacagcaagaacacctgagcctgactcatcgatcgcaaacggcagccactggctgccgtttttttatacgtttcccggcaagctgaagcggtttagcgccgggttaactcatcaaatatggcctgctttatcgggttcgacaagtaaaatctcacttcttcctgccctgtctcacaaaatgaatttgttgacaaaaagtgacaataaaatgtgatttagatcacacattttgacattgggaaaggtatgctggattcaccaagacgggaaagacaagaggtaaaatttatgacaatgaacattaccagtaaacaaatggaaattactccggcaatccgccagcatgtcgcagaccgtctcgccaaactggataagtggcaaactcatttaatcaacccgcacatcattctgtctaaggagccgcagggttttatcgctgatgcaaccatcaacacgccaaacggccatctggttgccagtgcgcgtcatgaagatatgtacgccgccattaacgaattgatcaacaagctggaacggcagctcaataaagtgcaacacaaaggggaagcccgccgcgccgcgacgtcggtgaaagaggcaggctttgtggaagaagaagagtaatccttaacttaagttgtgtcatgccacgcgccttcgggcgcgttttttattgacagagtgaaaacagtacaggtactgtaatccccactacctaaaggaatttaccatgaaacttgtcccgttcttcttcgcattcttttttaccttcccctgaccgggaggcaattcgtcgtataagaaagaatgcgaagacgaacaataaggcctcccacccgggaggccttttttatttgataacaacaaaggcaacatctatgaccgaggaaaacccattactggcgctgcgcgataagataagcgccctggacgagaagctgcttgctctgctggcggagcgccgcggactggctgttgaggttggaaaagccaaactggcctcccatcgtccggtgcgtgatattgaccgcgaacgcgatctgctggagcgcctgatgactatcggcaagcgccataatctggatgcgcactatatcacccgcctgttccagctgattatcgaagactctgttcttacccagcaaaccctgctgcagcagcatctgaataaaattaacccgcattcggcccgcgtggcgttcctcggtcccaagggctcttactcgcatctggcggcgcgtcagtacgccgctcgccactttgagcagtttattgagagcggctgcgcgaagttcgccgatatttttaatcaggtagaaaccggccaggccgattacgcggtggtgccgattgaaaacaccagctccggcgggatcaacgacgtctacgatctgctgcagcacaccagcctgtcgatcgttggcgagctgacgatccctatcgatcattgcgtactggtgagcacctcgacggatgccgataaaattcagaccgtttacagccatccgcagccgttccagcagtgcagccaatacctgagccgctacccgcactggaagattgagtataccgagagcacctcggcggcaatggaaaaagtggcgcaggcgaactccccggccgtcgcggccctgggtagcgaagcgggcggcgctctgtatggtctgcaggtgctggagcactgccaggccaaccagacgcagaacatcacgcgcttcctcgtcctggcgcgcaaagcggtgaacgtctccgaccaggtgccggccaagaccacgctgttaatggcgaccggtcagcaggcgggcgccctggtggaagccctgctggtgctgcgcaaccacaatctgatcatgaccaaactggaatcccgcccgatccacggcaatccctgggaagagatgttttatctcgatattcaggccaacctggattcgctgcccatgcgcaaggcgctgaaggagctggcggatatcacccgctccatgaaggtcctcggctgctaccctagcgaaaacgtggtcccggtggatccggtttaacattcgcggaacggtaatttcttcatccctgccaccgctaccggcagggtgaagatggcgcctgacagcggatactgcgccagctcatcgtcctccatgttttcccgggtggtggtgatatagagcgttttcatatccgccccgccgaagcagaccatcgtcgggcaacgaaccggcatcgggtaggattccagctcctcgcccagcggcgagaaacgggcgatccgccagccgtcaaacattgcgctccagtaacatccctccacgtcgatcgccgccccgtcagggatcccttcgccaggctgaaaacggcgaaagacttcgcgtcggccaggctcaccctgctcatccagcggcgtacggtagatcacggcgttcggcgtatcagaggtatacatccagcgccggtcggcgctaaaggccaggccattggcgccatggatgtcacactggatcactttcggctgcaggtcgttatccactcgcatcagcagcgcgccgttgtaatccccaggcccccagaaggtaccggcataaaagcgcccatcgcgatcggtcccgccgtcgttaaaccgcgccagctccgggttgctcgggttatcgcagactttccgccgcagcaggccgtgggcgtcggtcagccagatgccgctgcgcaatgcaacgataaacccgcccttctcgcgcagggcaaaacagccgacctcctctggaaactgcagcacctggtgttctccgctgcggatatcgtagcggtgaatttcacattccatgatatcagcccagtagagggcctgctctgcctcgctccaggtcgggcattccggcaggtatccggtgtagtcaaacagcggttgtggttcagccatcgttgtcatccctataaaaaaagccagcggtcgctggctttattgtatacatctttttcgctttactgccgattatcgttcgcctgacgcagcagcgtgcggctctcgctctggaaacgctgagcgtaatcgccaaaccagtgttcgactttacggaagctgtcgataaacgcctgcttatcgccctgctccagcaggccgatcgcttcgccgaaacgctggtagtagcgcttaatcagcgccaggttgttttccgatgacataataatatcggcgtacagctgcggatcctgggcaaacagacggcctaccatcgccagctccagtcggtaaatgggtgacgagagcgccagcagttgctcaagacgtacattctcttccgccaggtgcaggccataggcgaaggtggcaaagtggcgcagcgcctgaataaaggccatgttctgatcgtgctcaacggcgctgatgcggtgcagccgcgcgccccaaacctggatttgttcgaggaaccactgataggcctccggctggcggccatcacaatagaccaccacctgcttcgccaggctgccgctgtccggaccgaacatcgggtgcaggccaagaaccgggccctgatgcgccgccagcatcgcctgcagcggctccgctttcaccgaggcaaggtcaaccagaatgcaatccgccggaaggggcggcagcctgccgatcgtctccacggtggtgtgaatcggtacgctgacgataaccatgccggcatcggcgacgatatccgccgcccgggcccaatcgtttttttccagaatacgcacctggtagccggacagcgttaacatcttctcaaacagacgccccatctgcccaccgccgccgacgatgaccactggccgcagattcggctgcagggttttgaagcctttgtcgttttcgctggaataggattcccgcatcacgcgacgcagaacgtcctcgatcagatccggtggtacgccgagcgcagccgcctcttcacgtcgggaggcgagcatcgccgactcgcgctccgggacgtaaatcggcaggccatactggctcttcacctcgccgacttcggccaccagctccagacgcttagccagcaggctaagcaacgctttatccacttcatcaatttgatcgcgtaacgcggtcagttcagcaaccatactttcctcttaaaccaaacgggccgccaggtggccgcggagatccttatccagttcacgcagcagcgcctcggtagtctcccagctgatgcaggcatccgtcaccgagacgccgtatttcatcgcctcacgcggctgttcagaggactgattgccttcgtggatattactttcgatcatcaggccgataatggagcggttgccatctttgatctgcgcgaccacggattcagccacggccggctggcggcggaaatctttattggagttcccatgactgcaatctaccatcagcgacggcttcagtcccgcctgcgccatctctttttcgcatttcgccacatcttccggaccgtagttcggcgccttgccgccgcggaggatcacatggccgttcggattaccctgcgtttgcagcaggcagacctgcccggcctggttgatgccgacgaaacggtgcggcatcgccgcggcgcgcatggcgttgatggccgtagccaggctaccgtcggtaccgtttttaaagccgaccggcatcgacaggccagaggccatttcgcggtgcgtttgtgattccgtggtacgcgcgccgatagcggaccagctgaacagatccccgaggtactgcgggctgttgggatccagcgcttccgtcgccagcggcagtcccatattgacgagctcgaccagcagacgacgcgcaatcttcaggccgccttcaacatcaaacgaaccatccatgtgcggatcgttaatcagccccttccagccgacggtggtacggggtttttcaaaatagacgcgcatcaccaggtagaggctatcgctgacctctgcggcaagggctttaaaccgacgagcatattcaatcgcggcttccggatcgtgaatggagcaaggaccacataccaccagcaggcgcggatcgcgaccggcgatgatatccgaaatggtctgacgggcgtgcgcgatctgcgcttcctgctcgacgctcagcgggaattccgccttcagttgctccggggtcattaatacatgttcgtcggtaatatgtacgttgttcagcgcgtctttttgcatgattgcgatcctgtgtagctcgtttgcgataagggttgcctcagagggcatgacgtaacgataccacacaaagtaaagaattcaatccatattccgtaaattttaatttacaccaacgaattaattgccactcacaatggcgcgatgcgtataacaatatttacacatagaaaaaacaagccaaacttgcgcacccacggtatcggtactacgaaaaatcctggtgagaattgtcccaaagcaaagggcgcatctaatgacgggttttattaacagtggtattcttcgccgggcatcggcagcggcttttcccgcgctatggcgactttgacggaagcgttaatgacagtattacaccgtcttttattgactgtattttttctcatcgcggtatctcctgtttttgctgccggaccttcagaacatgttcgcgctattgtttccgggatcgtgacctacacccgttggccgtcattaacaggagcgccaaagctgtgcatttttgcctcatcacgcttcacccatagcctggctcatgaagatccggatgcattaccctatcaaccggtgatagtacgtaatcgtgaagaagcgttaaaaacgacctgcgatggtttttattttggcagcgaatcgccgactgaacagtcagaactcactcgccgctatggcccgaggccgctgttactcatcgcagaacaaaatacggattgttcaattggtagcgcgttttgcctgatcatcaatgacgaccgggtccgcttctccgttaatctggacgttctgacgcacagcggggttcgggttaacccggacgttctgatgcttgcccggaagaaaccacatgaataaggacttttcacagactccgcgcccgactttcaaacgcgcgctccgtcgcattagcgtgataagcgtggtgatctccatgacgctggtctggctgctgctaagtacagcctcaatcttcacgctcaagcagtacgcgcagaaaaatcttgagctcactgccgcgaccatggggcgcagcctcgaagccgccctggtgtttggcgacagcgcggcggcagaggagaccctcgcgtcgttgggcaagcaagggcagatctcccaggcaatcgtgctaaacggccagatgcagcacttcgccgcgtggcgccatgaaccgctggccaataaagagcaagtgagcgggcttatcagtaaatggctgtttccggagcccacggtgcagcccatctggcaccagggcaaacaaatcggcgagctgagattgaccgcgcttgatgaactgattagccactttctcggtatctcgattctggtgctgaccggcagcattctgctcgcctcgttcatcgccctgctgctgacccactccctacaccgggggatcgtcgccgccctgcagagcatcactgaggtcgtgcatgatatacgtgaaaaccgccacttctcccggcgggtgccggaggagcgtatcgaggagttccatcttttcgcccaggactttaacagcctgctgggggaaatggaggactggcagcgccagctgcaggccaaaaacgcgcagctgttgcgcagttcgttacacgatccgttgaccggcctggctaaccgcgccgcctttcgtaacgcgctcgccgagctgatgcagaatgaagtcgatcatcaaacctcggcattgctgtttcttgatggcgataatttcaaactgattaacgacaactgggggcatgcggcgggcgataaagtgctgatggaggtcgccagccgcctgatgacttttgccggtaaacgccatctggcgtggcgtcttggcggcgatgagtttgccgttctgctgcgcgaggtgcgctcggaagcagaagtgcaggccctgtgccaggcgctaacggaacaatttcttccgccattcaacctgcacaacggtcatagcgccacgctctcgctgagcgtcggttatgccctggcgtgggagcacgccaccgcggaatcactgcaagaacttgccgatcagaatatgtatcggatgaaaaaccaacgtatccagcagacgctgaaataataaaggactcattatgatcagaaaatatttcgtccccgccctgatggcggcggcgcttttgacaggttgccaggctcctcagggaaaatttaccccggagcaggtggcggcgatgaaatcttacggcttcactgaaagcaatggcgattggtccctgggcttatccgatagcatcctgtttgacaagaatgactaccgactacgtcccgacagccgccagcagatcatcacgatggcctcgcggctggcggctaccgggatcacccatagccgccttgaaggccataccgataattatggtgaagatagctacaatgaagccctgtcgcttaagcgggccaacagcgtggccgatgcctgggcggaaggcgctcatgtcccacgcagtaatttagtcacccgcggccttggcaaaaaatacccgatcgccagcaacgacacggcggccgggcgcgccgaaaaccgccgggtaacggtggtcatcagcacgccgtaagtcttcacttagtcgctggacttcatcatcctcattgccgttgccgcgcgccagcgcaggtagtcaacggcaatgaacagcagcaggctggctcccattaacggcatggccaatccaagggcaaacgccagcccaagcaccaggcttcgggcaggccaggcgagcgacagccacgcctgcagcagcgaatgcgccggatcccaggccgcctgaggcggacggcggatccaccataatcggtaccccaccccgatggtaacgcacagcgcgcagccaaatcccaccagcagcagctgattcgccagaccaaagaggatccccatatggaaatcgacgccccagcgggtgagcttcgccatcagcggaaagtcggcaaaacgcgtgcgatccaccacctgcatcgtggcgccatcgatcgccaccgcgtccacctgcgtcggccagcgacggtcgatctcattcaccgtccaggcgcggtcgtctgacactggcggacggatctccagccggctggcgttcagccccgcctgacgggccgccgccagcgcctggtcaaactgggccaactgcagcgccggctgatgctgggccatggccatcgcatccatatgatgtccggcatggggatcgtgcgtcatcggcatctcgccatgcagctgggtattgacctgcggcgtcagccagccgaacgctgcccgcattttgtccacattgccgccggcccattgcgaccaggtcaggccggtggcggagaagagcagcatacccaccagtaagccccagcccagcgtcacgtgcagccgacgatgattctgcagggcgttattcagccgccgttttggacgcgtcatcgcccacagggcaatgcctccgagcgcggccacccacatccaggaggcggccagttcgctgtataacctcccgctgtcgcccagcagcagagagcgatgcgcataatcaatccactggcgcagcggcaggatgccgctggtgccgtagaccgtcatatcgcccttcacccgcagcgcgatcggatcgacaaaaatagcccgggattccgactctccgagacccggatcggcaaacataatgcgcgtggtctcgcccaacgcaggcgccggacgcaccgccagcagccgcagattgccctgggtcgcttcttcggccaccgcaatctgggcgctgagcggctgcggagtcccctcggcaaggccatgcagcgcgtcgtgatagagccagttttccagctgcggcgtcgccacgtacaacgtaccggtcagggcagcgacaaagataaacggtccgataaacagaccaatatagaaatggaggcgacgcagcaggttcagccatgccgcgcgcgaggtgcaggttgtcatacttttccttttttaaagcaaaagaggtcgttgcgcggtgcgcagattgatttttattaaagggaaaaagcagacagccgcggcggggcgcgggtttcggggtagagccagggaaagtagtgccagtgctttaataccgggcgagaaaccggcaggcgaatgcgccgcagaagcatggcgacgaacagcgccagcgcgaaaaggagccccgggacatgggctaacagcacgcaatagccacacgcttcggcatggtccagcggcatttcgtgtccggtatgcgtggcgccgtctgtgctgtgcatcatcgccatcttgtgcccgggcatctgcgccatgctcgcggacgagctatccatcatcatggcgtggtgcatgccgggcatggcgctcatggggtctttttgcagggagacggagattagcggggccaccacgatcagcaggatcgccaacagcgccagccaggcggctcgccgtttaggtgtcgtttgctgaaaactgttgctgaccaccgcccctccgtatagagggcgtattgtaaatgatttacatcacgatggttacaacaaagataaaaaaagggccagccatctggccagccctttctatcaggatgtcgcgaaagcgaatcttagttaagacgctctttgatacgagcagacttaccagtgcgctcacgcaggtagtacagtttagctttacgtacagcaccacgacgtttaacagcaatgctgtcaactaccggagagtgagtctggaagacacgctcaacgccttcgccgttggaaattttgcgaacagtgaatgcagagtgcagaccgcggttacgaatagcgataaccacgccctcgaatgcctgcagacgttttttggaaccttcaacaacccatactttcacttccacggtatcacccggacggaaggaaggtacgtcctgcttcatctgttcttgttcaagttgcttaataatgttgctcataatttaatctcttatcctgggtaaactgatattgggggctcacgcctgcccatcatgtttatgctgctgttgcgcgtgttcagttttgaactccgccagcagctttgcttgctcttcagtcagagccaggttttccagaagttcaggtcttctaagccaggtgcggcccagcgactgcttcagacgccagcgacgtatctcagcatggtttcccgacagcaatactggcggtacttccatctcctctaacacttcaggacgggtatagtgggggcaatccagcaacccatcagcaaaggaatcttccgttgccgatgcttcatggcccagtactcccggaatgaaccgggaaacggagtcaatcagcgtcattgccggtaactcaccaccgctgagaacgtaatcgccgattgaccattcttcgtcaatttcggtttggattacgcgctcgtctatcccttcgtagcgaccgcacaccagaatcagtttctgattcgttgccagttcgctgacgcccgcttgatcaagcttgcgtccctgaggtgacagataaatcaccttcgcgccttcacctgccgcggcttttgctgcatgaatggcatcccgtaagggttgcaccatcattagcatccccggtccgccgccgtaaggacgatcgtccacggtacggtgccggtcatgcgtgaagtcgcgaggactccagctttcgatgctcagcaggccattttttactgcccggccagttaccccgtaatcggtaattgcgcggaacatttcaggaaacaggctaattatgccaatccacatagcgccgtcttttaccgtttatccggagaatttaaaaaccaggatcccaatctacttcgatagtacgcgtagtgagatcgactttcttgataacctgcccatcgaggaacggaaccaaccgctccttgataccaaatgcatctttcaggtttgccttgatgacgagcacgtcattcgacccggtttccatcatatcgatgactttaccgaggctatagccttccgtcgtaactacctggcagcccatcaggtctttccagtagtagtcaccctcttccagctccggcaactgcgatgaatccacgataatttcgcaattagtcagtagattcgcggcatcacgatcgtcaacgcctttcagcttgatgatgatgtcctgattgtggtggcgccagctttccagctcaacgacctgccactgacccgccttctggattaaccagggctgatagtcaaaaatgctttcggcgtcttcggtggaggaaaacactctgagccaaccacggataccgtaggaagaacccattttccccaatacgatcggatcaacaggtgcttgcgcggtgtgttgcttgctcatcatgaccaccgtgacagattaagctgctttgttagcggctttgatcagcgcggcaacgcgatcggaaacagtagcgccctggccaacccagtgagcgatacgatccagatccaggcgagtttcttcttccgcaccgttagcgatcgggttgaagaaaccaacgcgctcgatgaagcgaccgttgcgtgcattacggctgtcggtgacaacaacctggtagaacggacgctttttagcgccgtgacgtgctaaacgaatagttaccataacatcctcttgtgtgaataaaacaaccgggccccatcgaggaacggagcccggtgtcatattaaaagcccgaaaattttactgatttctggggaaaatgcaatcagcagttgataagtctgctgtaaaaggccgtcggcggtgcagccagtttagtaccagcgtgtgcgcaaccactgtaacgtacaggtagtacgtgaggatggcgagcacaccccggcgctaaaatggcaaacaagataaccttatgcccttgtttttaacgacccgggaagcctggcggcatcatccctttcatcccgcgcatcatcttcatcatgccgcctttcgacttcatcttcttcatcatgcgctgcatgtcgtcgaactgcttgagcagacggttcacatcctgcacctgcatgccgcagccggcggcgatacggcgcttacgcgagcctttgatgatttccggcttagcgcgctctttcagggtcatcgagttgatgatcgcttccatacgcaccagcactttgtcgtccatctgcgctttcacgttgtccgggatctgccccatgcccggcagcttgcccatcaggctggccatgccgcccatgtttttcatctggcgcagctgctcaaggaagtcggtgaggtcgaaaccgtcgcctttcttcagcttggaggccagcttctcggcctgcgcgcggtcaaccttgctctcgatatcttcgatcagcgacagcacgtcgcccatgccgaggatacgggaagcgacgcggtccggatggaacggctccagcgcttcggttttctcgccgacgccgaggaatttaatcggcttgccggtaatatggcgaatcgacagcgccgcgccgccgcgggcgtcgccgtccactttggtcagcaccacgccggtcagcggcagcgcttcgttaaaggccttcgcggtattcgccgcatcctgaccggtcatcgcatcgacgacgaacagggtttcaaccgggttaatggcggcgtggacgtgcttgatttcgtccatcatcgcttcgtcaacgtgcagacgaccggcggtatccaccagcagcacgtcgtagaatttgagtttcgcttctttcagcgccgcgttgacgatatcaaccggcttctgcccaacatcagacgggaagaaatcgacgccgacctgctcggccagggtttccagctgtttgatcgccgccgggcggtaaacgtccgcggaaacgactagcactttcttcttgtgcttctcgcgcaggaatttccccagcttaccgacgctggtggttttaccagcaccttgcaggcccgccatcagcaccacggccggcggctgcgccgccaggtcgagcgtctggttctcttcgcccatcgccgccaccagctcgttgcggacgattttgacgaactcctgacccggggtcaggcttttattgacttcatggccgaccgcgctctctttgacgcggctgatgaaatcacggaccaccggaagcgcaacgtccgcttccagcagcgccatgcgcacttcgcgcagggtgtctttaatattgtcttctgtaaggcgtccgcggccgctaatgttgcgcagcgtacgcgacaaacgatcggttaaattatcaaacattgtctctcgcctgaggtggaaacggtcggtcgccgcagcgacacacaaaacgaatgtggcggagtataacacgacatcaatctgaatgtgctgcaacggttggagcagaggcctgctaacgttatactgcttctctttcttatttagccaacagccgacacctatgcctgtttttgctctactcgcccttgtcgcctactccgtcagcctcgcgctgattatccccggcttgctgcaaaaaaacagcagctggcggcgaatggcgattttatctgcgactatcgccttgatctgccatgcttttgcgctggaagcacggatattccccggcggcgagagcgggcaaaatctcagcttactgaacgtcgggtcgctggtcagcctgatgatctgtacggtgatgactatcgtggcctcgcgcaatcgcggctggctgctgctgcctatcgtctatgccttcgcgctgatcaacctggccttcgccacattcgtgcctaacgaatatatcactcacctggaaaccaccccggggatgctggtgcatatcggcctgtcgctcttctcgtacgccacgctgatcattgccgcgctgtatgcgctgcagctggcgtggatcgactaccagctcaagaataaaaagctggccttcagcagcgaaatgccgccgctgatgagcattgagcgcaaaatgttccacatcacccaggtcggcgtggtgctgctgaccctgacgctgtgcagcggcctgttctacatgcacaatctgttcagcagcgaaaatatcgataaagcggtgctgtcgattattgcgtggttcgtctatatcgtcctgctgtgggggcactatcatgaagggtggcgcggacgtcgtgtggtctggttcagcgtcgctggcgccggtctgctgacgctggcctattttggtagccgcgtgctgcagcagttcgtgagctaagtcttttaaggaatcctacgtggaacatatctccaccaccacgctgatcataacgctgatcgtcatggtgattatctctgcctatttctccggttccgaaaccggcatgatgacgctgaaccgctaccggttgcgccacatggcgaaacaaggcaaccgccccgccaagcgcgtggagaagctgctgcgcaagccggaccgcctgattagccttgtgctgatcggcaataaccttgtcaacattctcgcctcggcgctgggcaccatcgtcggcatgcgcctgtacggcgacgccggcgtcgcgatcgccaccggcgtacttacctttgtggtgctggtatttgccgaagtgctgccgaagaccatcgccgccctctatccggaaaaggtcgcctaccccagcagcttcctgttggcgcccctgcaggtgctgatgatgccgctggtgtggctgctgaataccatcacccgcatactgatgcgcatgatgggcatccgcaccgataccgtcatcagcagcgccctgagcaaagatgaactgcgcacgattgtgaatgaatcccgttcacaaatctcacgacgcaatcaggatatgctgctgtcggtgctggacctggagaaggtcagcgttaacgacatcatggtgccgcgcaatgagattgtcggcatcgatatcaatgatgactggaaatctatcgtccgccagctgacccactccccgcatggccgcatcgtgctctaccgcgattcgctggacgatgccatcagcatgctgcgcgttcgcgaagcctaccgtctgatgacggagaagaaagagttcacaaaagagatcatgctgcgggcggcagatgagatctactttgtgccggaaggcacgccgctcagcacccagctggtgaaatttcagcgcaataaaaagaaagtcggtctggtggtcgatgaatacggcgatattcaggggctggtcaccgtcgaagatattcttgaagagattgtcggcgacttcaccacctccatgtcacccaccctggcggaggaagtgaccccgcttaacgacggcacggtgattatcgacggcagcgccaacgttcgcgaaatcaacaaagcgtttaactggcacctgccggaagatgaagcccgcaccgtcaacggtattatcctcgaagcgctggaagagatcccggtcccgggcacccgcgtgcgcattgagcagtacgatatagatatcctcgacgtgcaggacaacatgatcaaacaggtgaaagtgatgccggtgaaatcattacgcgagagcgtcgcggagtagcgctagcgaaggaattaatatcacggtgggctgcggcccgccgtttttttatctcgcgccgggagcgatgacacaaaaaacggccacccgcaggcagccgttgagcaaggcagcaagcgttatttcgctttcgctaccgtcaccatcgcggcgcgaatagtacggccgttcagggtataacctttctgcatcacggacagcacgttgcccgccgccacatcttcagactcgaccatcgcaatggcctggtggacgttcggatccagcggaacgttggtgtcggcgatcacttccacgccgaacttacgcactacgtccagcatagatttcagggtcagttcgatcccctccaccatcggcgccagctccgggttagccttgtcagccacttccagcgcgcggtccaggctgtcgatcaccggcagcagttcattgacgaatttttccagcgcgaatttgtgcgctttctcgatatcctgctcggtacgacgacgcaggttatcttcgtcggctttggcacgcagcatcacttcacgttcacgtttctgcgcttcagccagctgggcttccagattcgcaattttttcatcgcgcggatccacctgctcagccgaaacttcaggctctaccgcctcaacgtcgtcgtgctgctccgtgataatttcttccggggcttgcccctcaggcgttttctgttctttactactcatgaatttctccgcgtttttttcgcattcatctcgctaacttcgcttattatggggatcagtttccgggtttcaagggaagcggacagattgtcactatttcatttaacgcaaggacatccagatcatgaagaaccatttcaagtgtatcggcattgtgggacatcctcgtcaccccaccgccctgaccacacatgaaatgctctggcgctggctgtgcagcaaagggtatgaagtgctggttgaacagcagatcgcccatgaacttcagctcagcaacgtgaaaaccggcacgctggcggagattggccaacaggccgatctcgcggtggtggtgggcggcgacggcaatatgctcggcgcggcgcggaccctggcccgttacgacattaacgtcatcggcattaaccgcggcaacctcggctttctcaccgaccttgacccggacaacgccctgcagcagctcgccgacgtgctggaaggccactacatcgccgagaaacgctttctgctggaggcccaggtgtgtcagcaggattgccagaaacgtatcagcaccgccatcaacgaagtggtgctgcaccccggcaaagtggcgcatatgattgagttcgaagtctatatcgacgaagtctttgcgttctctcagcgatccgatggcctgattatctccactccgaccggctccaccgcctactcgctgtcggctggcggcccaatccttacgccgtcgctggacgccatcaccctggtgccgatgttcccgcacaccctttcagcgcgaccgctggtgatcaacggcgacagcaccatccgcctacgcttctctcaccgctgcagcgatctggagatcagctgcgacagccagattgccctgccgatccaggatggcgaagatgtcctcattcgccgctgtgattatcacctcaatctgattcaccctaaagattacagctatttcaatacattaagcaccaagctcggctggtcgaaaaaattgttctgattttcacggctgcctctttactggataaaaaaccagtctatactgtacgaaaacacagtattggtttttcatacaggaaggcagctatgttggcgcaactcaccatcagtaattttgctatcgttcgtgaactggaaattgatttccacagcggcatgaccgccatcaccggggaaaccggcgccgggaaatccattgccatcgacgcgctggggctgtgcctcggcggcagagcggaagccgacatggtgcgtcgcggcgccacccgtgccgacctgtgcgcgcgcttcgcgctgaaagatacccctgccgcccagcgctggctggaagagaatcagctggagagcgggcgtgagtgtttacttcgccgggtgatcagcgccgacggccgctcgcgcggcttcatcaacggcaccgccgtcccgctctcgcagctgcgcgagctgggccagctgctgatccagatccacggccagcatgcccaccagctgctgaccaaacccgaacaccaaaaaacgctgctcgacggctataccggtgagtatgcgcttactcagcgtatggccgagcactatcgccagtggcaccagagctgccgcgagttggcccagcatcagcatcagagccaggagcgcgccgcccgcgccgatctgctgcagtatcagcttaaagagctgaacgaatttaacccgctgccgggagaattcgagcagattgacgaagagtacaagcgcctggccaacagcggccagctgctcagcacctgccagcacgcccttacggtactggcggacggcgaagaggccaatctgcagagccagctttataccgcgaagcagctggttagcgagctggtgggcatggacagcaagctttccggcgtcctggatatgctggaagaggcggccattcagctcagcgaggccagcgacgagttgcgccactaccatgaccgtctggatctcgatccgaaccgtctgtttgaacttgagcaacggatttcccgacaaatcgcgctggcgcgtaaacatcaggtgatgccggaagagctgccggcggtttatcaggcgatgctggaagagcagcgcctgctggacgacagcgccggctcgctggaatccctcagccagcaggtggtcgaacatcatcagctggcgctggagaccgcacgccagctgcatgccctgcgccaggccagcgccgacgagctgacccagcttatcaccgaaagtatgcactcactttcgatgccgcacggggtcttcgcgattgaggtcgcgttcgatgaacgccatctcaccgccgacggcgccgaccatattgagttccgcgtcaccactaaccccggtcagccgctgcagccaatcgccaaagtggcctccggcggcgaactgtcgcgcattgcgctggcgattcaggtgatcaccgcgcgtaaaatggaaaccccagcgctgattttcgacgaagtggacgtcggcatcagcggcccgaccgccgccgtggtcggcaagctgctgcgccagctgggcgagtccacgcaggtgatgtgcgtgacccacctgccgcaggtcgcaggctgcggccaccatcatttctttgtctgcaaagagaccgatggcgagatgaccgaaacccatatgcagccgctggataaacgtgctcgcttgcaggagctggcccgtctgctgggcggcagcgaagtcacgcgcaacaccctggcgaacgcgaaagagttgcttgcggcgtaaactttttgattttcacagggtcatagtgaacagcaaattgcctgctgacctgcagccggaggtttccaacggcgcgaaggtctattattatcggcatattacagatgagccacgtactgctcgggcccaaaaaggaatcaaatcactatgcgctgtaaaacgctgactgctgccgcagcggttcttcttatgttgaccgcaggctgttccactctggaacgagtggtttaccgtcctgacatcaaccagggtaactatctggcaccaaacgatgtagcaaaaattcgtgtcggtatgacgcaacagcaggtagcttatgctctggggacgccaatgatgacggatccgttcggcaccaatacctggttctatgtcttccgtcaggagccgggccaccagaaagtgactcagcagaccctaaccctgaccttcaacagcggcggtgtgttgactaacattgataacaagcctgcgctgaccagtcagtaaggcccggaaaagcaaaaagcgctcgatgagcgctttttttatggctgatagtcggtctgctgcaggttactttgcggcgcttttctctgcccgctggcgacgcagctctttcgggtctgcgatcagcggacgatagatttccacccggtcgccgtcgtgaacttcgtcatgcagctttaccggacgactgtagatacccagcttgtttttcgccagatcgatgtcatcacgcagcgccagcaggccgctggcgacaatcgcctgctcgaccgtcgccccctcgtccaaggtgacccgctgcaggtactgcttttcaggcagcgcgtaagcgacctcaacacgaatattagctggcactgtagacctctttggcgcgcgaagtaaacgcctgcaccatgttggcggccagttccttaaagacccggccaaaggccatctcaatcagcttattggtaaactcaaaatcgagatggaactcgattttgcacgcctccgggctcagcggaataaacttccagccgccaatcagcttcttgaacgggccatccaccaggctcatcaaaatgctctggttgctggtcaatgtattgcgtgtggtgaaggtcttactgatgccggctttggacacatcaaccgccgccgtcatttgcgtcggccccaattccagcacgcggctaccggtgcagcctggcagaaaatcaggataggacttcacatcgtttaccagttgatacatctgttccgcgctgaaaggcaccagcgcagtacggctaatctgaggcatagcaggttccacatttaaacacagtgcaaataatatcatttatctgctgctaaaaaaaacgctgtgccgcaactcgtgctaagatgcgcagtatacctcgcaggatgcgatcgaggtaactgtgtataagacgatgacttcaggacattatgactaagaaaaaagcccacaaacctggatcagccaccattgcgctgaataaacgcgcccgtcacgaatactttatcgaagatgaatacgaggctggtctcgccctgcagggctgggaagtcaaatccctgcgtgcaggcaaagccaacatcggcgatagctatgtcatcctgaaggatggcgaagccttcctgttcggcgccaactttacgcccatggccgtggcttccacccactatgtctgcgacccgacgcgcacccgtaagctgctgctcaaccagcgtgagctggacacgctgtacggccgcattaaccgcgaaggttacaccgtcgtcgccctgtcgctgtactggaagaacgcctggtgcaaagtgaaaatcggcgtcgccaaaggtaagaaacagcacgacaagcgtaccgacctgaaagatcgtgaatgggcgctggacaaggcgcgtattatgaagcacgccggacgttaatttcccctccccgaaggccagctctcgctggcccttacgctatatccttgttgatgctgatttttcgtccaccctgctgaaataatcctgcgtgatggggctggtaacgacattcacaaatctgttatacttgacctacacattggggctgattctggattcgacgggatttgcgaaacccaaggtgcatgccgaggggcggttggcctcgtaaaaagccgcaaaaaatagtcgcaaacgacgaaaactacgctttagcagcttaataacctgctctgagccctctctccctagcttccgctcttaagacggggatcaaagagaggtcaaacccaaaagagatcgcgtggatgccctgcctggggttgaagcgttaaatctaatcaggctagtttgttagtggcgtgtctgtccgcagctggcaagcgaatgtaaagactgactaagcatgtagtgccgaggatgtaggaatttcggacgcgggttcaactcccgccagctccaccaaataaaacaaggggttacgtgaaagcgtgaccccttttttttggattgtggcggcaaaatggcggcagacatttatcaatgcaaaggactaccgatatgaaaaaatctcttttgatgctgatacttttgacctcatgcaacgctttcgccgacaaaatcccgaactctattgagaatctaattgctgtgttcgacaccaggacgcatagcctagaaagcggcgtactctcgatcaaatacagcaaacagaaattgcacattgatgcggctgatgcaatgtttgaaggcatttgcactgacctatcaatgcataagtggaaacccgaaacaattaagaagattaggctactcaacgtctcacttgatcaaggttttgagatagatgccggcggtgctgaatgtaaaaaaacgggtaagatgacttttgatgaagcgcgggcttacaggcaaggctttatcaaacctattccgtaaaccctctttgatttgtaggttaaaagctcaaaaattcatatgcccctgcccgcttgttgccggatgtggcggggcattatcaattacacctggcgtcatgatgaacctcacgacggtttcgtgagtaataaatgtagtaccgcaattaatattctggcactggcaataccgctcttttgtctggtctgttactcgaaagctacttcgtgtatgcgccgcatgtccgcattttgggcaattcatcatttccgtttctccgccgccgcctctgaagtcgcgttaataatacacaacatcaatattgagagccaactattcaatattgagatcatctattttcacttccagttcgatgctggtcgtaaatccactatccgggttgaccgtgtgcgttaacgtggtgatggtccagctggcatcatcaatgggttgtttaaagccggtgaccttcacgggcatttccgtatagagatctgcgcggccttctgccagctgcagggaaaatgacgccacaccgcgctgcagccgctcccagttcatttttgctgcacgctccgcattactgcggttcgcataggtccggttcagaaccagcacgttctcatccgtcccgatcaggtaatccccctgctttgcttctggctcttttggttttgtcgttttccggcgacgcttcactttggtggtttcttttttctccggttcgcgcgtatgcaaccagtgagcaatcaccccggtatacgctcccctgtccgccatgctgaagcggtgactgtcaccgtcccggcgggtaatagtgatgaccggcagcgctttaccgctggctgttctcccctgcccctgccggataaacagcaggttactatccttcaccgatgcaatcgcgccgtactgacgcgccagcttcatcaaaaagctggcgtcgctttcgttggtctggtccaggtgatccagcgcctgctccgcgacatctttaccgatggcaaccttcaggctgtgccgcgcggcaatctccttcaccacctcgcccaccgtcgttttatgccacgacttttcacgccgtacattcagcgtttccctgaagtctgcgctacgggcacggattgtcagtcggtccgggctgccgctatgctcgatctcatcaacggtaaacttcccttttgaaaacagcggctcgcctttccatcccagcgccagagaaatcaccgcgccccgacgcggcataattaccaggccgtccgcgtcgtccagctccagatcgagctggtcggcttcaaatccgcggttgtcggtcaacgtcatactcagcaggcgcttatccagtgtctgcgtggcatccttacctgcaatcacgatgcgaaaggccggggtcttgctgaggttgagtaaatcagtcatctcgctcactgcagcaaccctcctaccgtggttttgatattccctaccgctgccgctgcggaatcctgcaggctgctaagctggtcactcaggctgccgaacatttcggacagcgactcatcaacacgctttagccccagcgaaaactctatttttctcgcttcaccgctggcgaaaaattccgtttttgtctggctcagattttcaatcacgtacataccgtagatggtcccgcccccctcgatcagcggccaggccttcccctgctccgccatcagctccagcgccagcagcgacaaccggcctccggtcacttccggcatgaggacgccggatagcgtgagctgatcattatctggccccagaaactgcgttgtcggacggcgattaacgcggttgttggtgacgtgccgccagttccgctgatactgcagttgctgatagggcaccgtgcgcagctgaaacacaaacaaacccagaaccatcatcatgaatcataccccccttgatcgctgaagttgctgcgtgccttcgccattaaacgccgctcatgctccgcaaacattcgcgcaacctctttcgcaatatcctgcgaactttgccccggtaatgcctggataataaattgcggcttcgattcgatatgaatgatcggctgcccccctgccggcttctcagctgcaggccgataggatgttgccggcaggctcattggatgaagtggcgcagcctctgccggaatcgctccccccatcatcccggcgacaacggacgccagcgccgccgtccttcggcggctggtcacataggccgggccgttaatcagttccgggccattctcgccagcaatgcccacctgcccgcgtggaatatatccaccgctgtcatacatacccgcaaagaatccgcctgctcctttctgctgaagtgcacctggcgatttgtcgccgccggtcatccagtccggcaggtagcttttcaccgatgccagcttgctcttgagcatctcccacttctcattgataccgctcaggatgccgtcaatgatcgcaccgcccaccgctttaaacttcgcgggcagcgcggcaacatcacttagaatttcatcccatttgctgctaatagtccgtttaattacagtccataccctggatacccctgacgaaatggcgtcccacattgcggtgaattttggccccagcgtttcccagttctgccagatataaatggctcccatcgcaatcaggccgactatcgccaggatggggttagccatcatcaacctgcccagccacaggatcgcctggcctgcaccgccgatgacttgcttaatcagaccaaaagcggaggcaaacttaattcccagaaccccagcgctcacacgtactatcgccattggccccagaatagatgccagcgccagcgacaacacgcccgctgcggtagctaccacggcaaacaccgccgcaatcttaaacagcgccgccgtcaattgcggatgccgcttaacaaaaccatccagcgcggacgccagatttcccagccagtccgcaatatttttcagtaccggcgcgacggtttcaccgatgctcgccatggcgttggtaaaggagccgccagcggcttcccatttgttgcccagggtattaagggatgcctcgacgcgctcgcgcagggttgcctgattatccagtttggcggctgtttcacgataccccgcaatccctttggtgatcatgatgttcagcgcctgcagggtttctgcatcatcaccaaaaagagccgctttgacagcctgtttttttccatcgtcagtgattttattcagcttatccagttgcttatacaggttttccagccccgcaaactggcctttactgttctgaaaacttagctttatccccgttccagccagctcatcatttgccttactgatttttttattgttcagcgtggcctggaaaatcttgcgataggcgttacctgcagactctcccgccattgaagcctgatcagccataaccagcagcggcgcgaatgtttttgcggcatccaggccttgctgcttgataatgtccatcgcggcgctgatttttgaaaaaccctgcagcatattgccagggtcaacgcccgcgtaataaccccgctggatcacgtccatcaggctcatcatgtctttttcggtggtctgcgtggcgtcctgcagttttgcggcgaactctgcggcatccgtcggtgccatctgcagctgcacgccgagatacgccgccgactcacccagcccgcccagaatgacctgcgcagacataccctgacggcgtaacatggtcatcatgttttgaaagtctgccgtggtgcctggcagccgatcacccagtgctatcgccagcttgttcagcttcaggaactccggcgcaaccttgccgcccggccccatcatggagcctgccagctggttagccgcgttctctgattccgaataggcgcgaatgggggccagcagcgtcgcgcccgttgtcaccccggcggccatcatcccggccccgttccccgcgaggctgttacgcacgtcgcgcatcttgtcagctttcgccctgaccgcattcagcttgcgctggcgctcgcccacgtcccacaagcgtcgctcctgttctgccagctgcttgttatagcgatccgtttcgcgggtaatgcgggctgtttcacgggcaccgcctcccgcagagatgccgaggcggtacagctctgccctggccgccgccatctgccgcgtttcctgcccctgcttttgctccagacgtgacacggcccgccattgcgtttcaagcgccgccgtctgctttttcgtgggggattcaagggctgacatttcgcgggtcatcatctgggcacgcagccgcgcctggtccagttcgttactggtccggctcaggctctgtgacagctgatcgaatgattttaactggccccctgcatcgttcagcctcttaagctgttcgcgggtctgccggacagcggaggccagctccttagaaccagcctgcgcaacttttaaagggcgggtgagcttatcaaccgcattcagaaccacctgcagacgcaggtttttatcactcatcgctggccccgcttcgcattatcgctctgtgccgccactccagcacttctgtaagcggcataacgtcagtgacggacggcggccagtgaaagatcgtggcgatatccgccaccaggtcatctaccgtcaggctgtcggcaaatcggcaaacgccgacttcggcaacaaaaaaaggaccacctcgatcgacatcgcggccaggtctgccgggtcgaggtccgccatttcctgcggggtcagcgtcggcgtggagatacgggggatcacggtcatcattgaggccacgtccatctccatcaccgcctgcagccgcgtaccgcgcagtgcgccggattgcggtttacgcagcacaatttccgtaatcgtggcatcaccacgcgtgatagggctatccagcttcaccgttgctactgttttctcactcatgctcttttcctgttatggggtggctggcgcggcatcccgcgccagtgctgcattaaaggccgatggcgttgcggtgctcttccatcaggtcaacgccatcaacaatttcaatcatgttgatcacatcgacctcgtacagcacctcgccgttaatggtcagcttcgcatagctgttaacgctgctgactttggtggtattgctctcgccggttttccactcgccggaatccacctctttgtggcgtccgcgtacaaccagctcaacggcctgcacctcgccggtgtcatcgcgctggatagagccggtgaagcgcatctgcaccccgtccaccgtggccttgcccatctgtttaaacagcagtgcctcagtgccgccgatggtcatttccgtgtccagtgcgccatcatccagccccagatcgataccgactgaaccgggcatgccgcccccgcgatagttctcaagcttgcgggaaaatttcggcagggtgacggattcagcaatgcccatccagctgttaccggcgttgaagatgttcaggtgttttagtttgcgtggtaaggccatgggtcccccttatgcgcttacgcgggtggtgaaatccaccaggtaacggtcagtgatgcgctggcgcagcatcaggttttccagcggcggcactggcgtatagtcgtagtcgatccagagcttcccggctttcaggctgtctttgtcgttaacgctgtcatcaatccagcaatcaccgccgatgaggtagccctgattcaccaggctgcgcattttggcgcggataccttcgataatatcgcgggccagcgacgggttaagcggcatatccaccgcccacatatggccctctgccatggtgtcagccagtacctgcgcggtgcgggtgtagttttcaaactggaacagcggatcatcactgaggcagcgggaaccccagaagcggaaaccatccttcctgatcaaggtggtgacgtcgttctggttcagcagtccggcatcagttgccgggtcctgcagatcccagaacacatccgcagacaagccggttacgccgttgacgcccacgttagacagggttttgtgccagccggtttgctcgtcgattttagcgcgcaagccaagggcgcgggcggtagcgtaggcggtcgcatccgcctgcagcaccgtgtcaaagtttatgaagtcaggccagataatcattccttcacgctggctgaagttgtcgcggtaagtgatcgcctctgccacggttttacagccgtaagctgacatatacgcaaaggcccgcaggctctgcgccacgctcagcagctcagtggatacggcctgcgtatcatgccccggcacgccgagaatgcgcggtttcacgcccagctgcgactgcgcggaaagtagcgccttcatgccggttttcttaccgtcggcagtcacgccgccgataatatttgaggtggtttccgcttcggtttcgccctgggcaacgcgcaccactacggtgacgggttttgcctggtctgcgatcgcgtccagtgagcgggccagcgtaccggactcgcccgctttaccgctggcggtcagtacatcggtaagcagtacaggcttattgagcgggaacatggaggcatcggcatcatcgccggtgcacaccatgcccacaatcgccgtgctcaccgtcgtgatagagcgggtgccgtcgttaacttctacaacgcgcacgccgtggtggtagtcttgcgccatggaatgaatctcctgtttaggggttcacccatggtagggaaatcactcaccgcaagccgttgatgcccgttgtaccgtggttgatacaaccgcaggcagaaaaaaagccccgttacggggctgattttgtcatagttcgcctggcgattcaggcaacgcggctccagcacatcagcagggtgtgagcttccaccacgctgaacgatttaccctcgccgaggttgtcagttttgccgctggtcgtgtgtttgtgcggcggtactgtgacttcgtggtcgtgctctccggcatcatccgtcacacccggctctttcgggttaaagagctgccgcacatccccgccgatttcccacgggtcatttttaccggccacaccaccatgatggtgaataccaccgcgcgtggtcgtcagcttctgctcaggctgctcgctggtttccccgcttacatcaatctgcacggcgggaagattcgcccgctgaagggtgaccgtatcgctgccaccggtggcgccgacgttcgaaccgtccgcttttgccacccggagggttctgttctcaccggtatacgtccacgttgaccacgggtagcgctcattcggatcaacatgctggctgtaaaaccggaccgtgccgacggggttttccgcttcccagaaatcacgaatggcggtgctgaccgctgaggtgatggcctcccttgtctcattctccagcgtggaaacaatgtcatcggcataatctttggcgttgttccccgcccggcggacctcttccaccgtcgccaggatgactgacgggtccgcaatcatctgcacatcggcggtctgactcaccatcagccagatattaatcacctggaaacgtcccgacccttccgccagaagcggcttgtaggattcgggcaggttcgccaccgccaggcagatgccggtctcgtcaaagagtgcggcctcgcgtatccagaagcccccggcctgtggcggcattatcatttcggcgcggataacatttgccgcctggtcggcgatgaccagccggtttaatggtgcgcggtactgctcgttaatcagggcggtctggtccggggacggcaccggcaggacgccgcccccgtcgccgacagccatgtgagtgatacccagggggatacccttcaccgccgcagcggccaggcgttcagccccctgcgcggtcagtatggcgctgaattttttactcataaggcagtccgtaatagcgggcttccccgccggagcggggcagcctcgtgattaactcaggggcgcgtaatacaccgggcgcagacccatctcggaattcagcacctcgatattgttggcaaagccaaactggaaaatatcgttcttaccgcgcaccggatgcatgcagcttgtcgcgcccgcgttgtagttgaccgtggaccccgccgggacaatcgccttaccggtcagggacggccatacgccatacagctccagaagattctttaccgcttccggcagcgtgttctgcggctgaacgaaggtcccgccccaggccgggtgataaaactcgttgtcagccagcccggtggtttttgtcaccgcccgcacgctgttgggggtggtggccacatagtccgccgtggtggtgttcccggtgtgcgtcggggtgataaaggccccggtcaccgcatggatagcgtaccagcccggcacatcagcgccgtgcgcactgaatacagcggaggcggcgagcgcggcctcattgccggtcccgtagagctggatttcgccacccaccacacgcgcgccgtaggtacgctcccagacgtttccggcaaggtcgctgatgccgttgtattttttgtcctggcgataagagaccggaccggagccggtataaatgcgcggagactgcgaggacaaatcgcccgcctctttgccgtcgatacggcgtccggtctgggtcgcatccagcgcggacttgccgtacacatcggcccccaggggactgtaccggcttttcacggccatcgcctgcatcagcgcccactcgaccgacgtcatgccgtgccaggtgctacccatcgctttcagtaacgggaaaagggtggcgctggttgcgttacaggcattcgcatccacgttgggcagactcaggacctcgccgttcagcacgcatccctgataggttccgacatacagatacgggatttccctgtcgccctgcttaaaggccggatgtacgccggaaatccccagcgccgggttcatgctttcgatactcaccttcgggataatattcacaaaggtcggctgtcccttcggggtatacagcaccgtctgttttccgcccgaagccgcctcaacggaggcccgcagcgcatctttgactaaaatcgtggtcatggtgggtccttactgttggtagctgaaaaaagtgtccaggtatgcaatacgctgtcgggtccagtccatcatctggtccagactggtgatgctcagggagggcacattcggccatttttcatattcagcctgcatcagttccggggtgtagcgtcccagcaggtctcgggccagctccagcacgccgcactgtgaaaacagaccgttatcccgcagttccgcatagcgggcattcatttccgcctggaaggtggtacggactttcttccagaaggtgcggttgacctgcatggcgaggccgttatcaaacagattcaggtctggcggataggcaatggacgtcccggcgtaatgcagaccaaaggtggtatccaggtcatagggcatgaaaaaccatttcgtgccgtcccaggtgataaacgtggtgttcttctgcacgcagtccggggcgcagataaagctgaggaagacgtagaaatccaccacgttgtttttatccagatgcgtaccggcggcggcggtaaacgcgtcctgcgcggactgcgcgaagtcccgccagcggtcgaggcaggcagccgtttccgccgtgggtttcgaaggtgagtccatcacccaggtgccgttatccgtgagcgccgggatgttaatcgccccgtcccagataatcatgatttgctccgggctgtttttggcgatgttgtaatccttgcgcgacgagttgtagagaaaatcccctatcccgtaaaactcaccgttgatatacagcacgcaggcgtaccccttcgggcagccgatggcgccggtatcaatggcgctggcccccagcttccccacgtagctgttatcaatatcccggcgcggccagccgctgcgggtcgccatcaccttctgccacaggttgtagcagagcacattgcgcaggtgggtcgagtcaatccagttcgccttgaaaatccatttatccttcggcaccacatccccgattttcaggctgacattttcggtatgcgccgcgtcggcaaacagctcgaatttcatgttctttttcgggtaccccgctgacgacgccccctgaaccttgaaggacacgtatgccgtgaacatctccccgtcgacgtccacctttaaggtgccgttaaccgggttgtccttgctggtcggtgcgccgctgtcggaggtcacgtccaggcgaatcagaccgcgcggctcaccaaaggcaaacacgcccggatatttcgcctgcgcctcccggtttcccgtgccactgcctgccgctgaggggtcgaagccgtcgagcgggagaagctgacgggccagcacctggaaggcatagaggttactcagctgatgactttccacctcctcgggggtggcctccaccagagccagcgcccgcataccggactgaaacgccagcatcagcgcctgaatctggtctgactggcttttttgtgaagcggccatgctggtcacctgcgcggccatctcatcaagaccgagctgcatcagggcggccgtcagcgactggagaccggactgcaacgcggtcaggccatccagcgctgagccggtgtcctgctccagctgctggcgcagggacgtaatcgcctgctgacttgccagtgcattcagccggttcgcctggccgttgcgcttctggtaatagataaaggccagcagttgcccctcgctgtcaggcaccaccacgcgaaagagtttcccctccggcgtaccggcaagccccgcaagggtgccgtccgggtcatccggggtcatgaagaaggtgtaatcccggtagtcctgcagcgactcaacggcggtttttaaatagcgggtacggttcgccagctgccgggcctgtttgtttgacggaccataaatgccgccctccacccggtcttcgcgcgccagcaggtaaacctcatcttcccattttgtctgttcgttaattgcactcatgttattctcctgcgtaaacgccacggccatcgtgaaaagtgcgcccgtcatagcgatgtgagtcttctccccgctggttttcggtataggtgaccgacccggaatggaacccgccgccgtcataacgggcggcctcatccggcgtatattccggcggatacacgctgatgacctccccgctgcacgatgcggcaccggtatacaccggaccggtggtccccgctgacagtgacaggcgggcaatgtggcggctgaccggccgcgcatcgccaataatccgctccagctccttaatcatcgtctcggtaataccgatatcattcaggtcaatctcaaggcggaatgtcccggcggggtcggccacctcccaccattcctgaagcgtcatgctgtagccgaggttttcaatcacccggcgaaccgccgccaccgtccccttgcgttggtggatccagaacgcatcgctgaccgcctggcgcttatccctctctgaccaggtttcctcccagcggtcgacggaaaacgcccacgccagatacggcaggaatttcaccgggcatttccacgggttccagaggtcacgcagtggcacgcttaaatcactgatacctgaacaggcctgcaccagcctgcgctccagtgatgacgatcccggcggtaacaggctattcatcagagccaccaatttctgctttaaaatcggtgcaataggacgcctgcgttttatctatcaccatgtcagccaggggctgcatcagctcaacccgctgcacgccctgaacatgcagagcggcataaatcgcagacagccgcacatcacgccccaggcggcgctgctcattgatgtatgcagtgccctgctctttcgcggcagcgaggatgggttcctttgccgggccgggatagacatacagaaccgcatcgatttcatagcggacaatctcagcagagcggacgctcacccggtccgctacaggccgcacggcctcatcattcagtgcaacaccaactacctgcagcaagtcatccggcgcagtgccatcaccgtcgcgggccagaatagtcaccacgacttccgccggtgccgggctgaatgctgatgcatctgccacacggccatcggcgctcagcgcgtgaaattcatacgcgccaaccggcccggcaacgctcatcccctcaaaggccgccgggatgcgctgccgataatccgcgtccgattccatttccgcctcagtgggtggcgtggtggtatcgtctgcgggggtgatcacccggcgctgcacgttattgttagcgcctaaattatccaggtcatcactgccggaataagccaccatgacagcccgtgccgcctcgttaatccgctggcgcagcagcagctcccggtacacgttttcctgcagcgtttttacaatcggctctgactcaagcgttaaagtacgggccacggcttcctgctcttctgccggatagagcgcgacaaactccgctttacgctctgtcaacagggtttcaaaatctggctcatcaacgatttgcggtggcggcagctgggaaaggtcaataacggccattgtctgctcctgtcgatacggaaagggacacaggcacaccgtcattacgctggcctgccagctcaatcaccattgagccttccatgttgctgctgttaatcgtgatggtgtcgagctgcaaccgcggctcccagcgcagcaacgcgacgtacaccgcagacatgatctgcaggcgcagcgcccgattttgtggctggtcaatcagcgcagacagcagggagccatactcccgacgggcaaggcggctaccctgcggcgtcagcaaaatgtcccgcacggactggcgcaggtgatccgtttccgtaatggccttgccggtatcgcggttcatcccgatatagagcgtcaaattggacctcccgttgttccgccgctgtcgccagggtgtttatgcttatcggcaacgataccgtttgaggtcatttccccgccgtcatgggtcacatcgccattaatgatcacgttgctgttaatacgggtcgtgtcggcctcgatcacaagctcccctgttttgcaggaaaccagctgtgacgactcaatcagcacggctttaacgccccggataatccagtgcccggtggcagggtcgtattcgaaccagccgccatcctcgtattcggtcacgtccgcgctttcagagtctgacggcggcgggcaggcgttggagtaaatggccggaagcgcaaaagccgtctccagattgccgcccaggctgaacagcaccacctgctcccccggcgacggacaccaccaggtgcgggatttaccggcgcggtaggtcagccagttaatccagttggtttcgaggtcgccagttttcacccggcaaagccagccgtcccggtccacctcggtcacaatgccggtgcggatcagattggtgataaggcgcatgatttcggttaattgagcattcatgtagacgatacttacataaacatttatcttggggcataggagatgaagtgtatgattaacgatacaatgacaaatttttatgtaaggactagaaatgactccttttggaatttatgggtatattttcactaaagaaatgacatttgatttaggaatattaactcctcgcttcaacaatcttcacgagatcaagaaagaaaaatgcaacggagagtcttatatacttacaggttttttcactcctaactcaagcgcaaataaaaatctctctcaagctctctttgatctttcagcaattctaagctttattgaacaaaaaaatgtaatcatagcccattcactcaaagagaatgaaagccctttaacattcggtgatgacttccccataactttagatataaaaaggaaacgtggcccaggacaaataataatggaagactgtttctctaaagatggaaggtcagcattcattaagcttgccattaacaaactcagtgaaaacaataagaccaatcaaaacccatttagaacagccttcttcaaatctatgctttcttttagagagaatataagctatgtagatgtaaactattacctatcgttctctgcacttgaatccctatgtagatatatacaaaatgattatgcaccttccagagctccgcaaataattacaacgactctacaaaactatggtttcaatgtatcaaaaaaagataacgctgtaccacaaagaaacatcatgcactattgcgcacttcgcaacgcattgtttcacaaaggcgattacattgcgctcgtcgaatataacaatcctgacagcattatatatttgaaggattactcatcctgtattagcctacttctctctttattgataatgaaacacataggatttgatgacaattatattaattgggactcatggattgacaggcaaccattcattagcaaaaaataataaaacaataatggttctgctttcatttttgaatccagtctagcaacgtctcgcgcgtaatgtcctccacttcatcattgatgccgagtaaccggcgctgtgaatactgcacctccggccctctgcggctcacacggtcacgcagaccgtaatgatgaacgcgggcaattcgctgtaccctgccctcaaattcgacactggcagagtccgggctggcagcggctttcaggtattttgcggtgcggagtttggcaaacatttgccgacgtatgcggccagttttcgtgcgcgccgttacccgtcgtggttcgtatgccgtaccgtccgggttgcgctgcatcctgatatttttctgctggctgcggcgcagctgctgcgccagctcccgcatcatgcgcttacgtgcggcaggctccagccccgccagcagcgcctctaaccaggcgtcaacttcctgcagctcagccacggcgcaccgcccacatttcgtccggttccggcaccgcttcgacgctggacacgtcaccgtcagcactgacgataacgcgctctgtcagctgtagattcaggctgatatcgcagatatcattgcgcaagatatcgacctcaaacgtaaacagcttttcacgcagttccgggttatggatagcatcgggctgattctccatcagccaggccagcacgggagccatcagtaatccctgatcgccgctgaaatccacgatcaccacgttaagggtatagcgatactcccaggacaacgacgccgcgccggtcgccaccaccgctccgttatccacgaataaatgcaacttgtccgggttgtcccggacatacgccacggttttattcagggcgaggcgtaaggactgaggtttgttcactgtttcgctcctggcaggaaattatcgtgtccaccttgtcagcacagactgaccaggcagcctccgcctcatccagcgccgtcagtaaatcaccgttagtgcgtgccgctgacttttccaggcggcactgcgtcaccctgggacaaccattcacggtaagctgcacctccggcgagggccggacgttcgcgcatcctgataatgtcaggaggcaaaggagtaccagcccagcggcgcaaatcctcgttttcacgttttagctcctcaatccggcgctgacggcttcgcagcagcgcgtttgtactttctgccgccgcgtaaagccgcgcctgttcccggttgttggtttcggtcaggatggacagggcgatcagctggctgttcgtttttgccagtttgtcgcccgccgttttcaggtccccgccttgctgatcgatggtacggctggcctcattcagtcgccatgactgccagcccagcgccgccagtacgagcgcaagaattaccgccagcgcgcgcgtcataccgtcaccggctgcgcatcaacaacctgcgcacgcagaaccttaagcgcgaccagcgtcagcagataaaatgccagggtgacaacgtggcccgtaaaggcgagaaaaatcacaagcagtgaacgcctggcccatctgatcacattgtttcctggcgtactgaaaaagcgcgtaagcgcctgctttgcctcttcccgatgagtgccgcccgcataccacccggccaggcaaagcagcaccgccacccagaccaacaaacaggcgacccaggtcaatgcggtgaccagcgccgaggccatgccgttggggacaaagagacttaaaatcatcagcgccgcgtacagcaccgaaagcaacccactgataaatttctttttcatttcgttacgctccttttaagcaccaggccagctcccgcccccggcggttatccagcccctgattaaatatgcctttgacatatacccagcgcggcagctgatagcaggcatcgcgccagcgcttctgattgataaacttcaccatggttgagctgcaggcattgcccgtgccgacgttgaacgccagcgacaccagggcgtcataaacgtactgcggcacgttcaccaggacacaccgcgccagggcggtttcaactcgtaatacattggtgatgaagttccccgccgcctgtcgctctgtgatggttttccccggcaccacgcccgacgtgttaccgatgccgtcggtccacacgccagcgtcgcactggtacggctgcaggcggcatccctcgtaatcggctatcagttttagcccctcaacggaggtgtggagctgctggaaaccgggcagcgtggcggcgatagccagcaccgccccgacaaggcagcgcttaacgattgaaggattcatattccccctgggttatcttcccgccgcgtagcagctgataggttttgtgtttgtagtaccagttgatcgccagcatcagcagaccaatcagcacaccgcccaccgtagaggcatctttaagcgataaatcgcccatccacgccagcagtacagcaatgcagtacgtaataaaggcgctgatccgttcaagcgtcatcattcagtcccataactggacggtctgcaccgtggtagtggtcgcaatatccggcagctccacctgcagcccgtgaggtaaaaaagggccatgctcagccagccccggatttgcctgcagtacctgctctgtgacgccctgcgtgcgcccgtaatgacgccagcaaagcgcatccaccgtgtcaccctggtacgcacgcactttcatcagatcagctccaccgtacagtggggcgcatcctgcacccggctgattgcccagcgggcatcacgccacagatcgccgctggcctccgccagctcatcgcctcgcttgacgccggatgccgtggcgtcgtagtcctggtaccgctcattcacctgcgcacgcgcccagcaatacacggcgttatggtagtggtggatgcgctcgcttttgccgtccagcgcttccgccggtacgtctgccagggtctgaaaccccaacgactgctggcgcttgcggaattcgtacagctccgcgttgacctccgacatagcagaccggataagctgcccgagacgcggcgacgtcaccgtaccatccgttcgcatcacgctgcgaaaatccgacaaatccacatcgggccagaatggggtgtttttgatgacctccgcctgttccggcgcctgttctggcgcaacaaatctcatgcgggttttctcctgaaaaggtgggcggtgaacgggattttgataaggcgctgcctgtcgccatcccgtgccgcccgtgcgcggggcacgttccgttagtggctgttacgcaaatgacgctccagccgctctttgtcttttttcacaccgcagcggggatcgagctgcagcgcaaacgtgtagtggttcagggctgcggcggggcgggactcgctgatcacggcggcgatagctttatgcagccgggcgcgggactggtccggcatgtccagcgcatccgtcagcgaaagcgcctgcagcagcacgtcagcagggaattcagctttcattcgctgcgcggcctccgcctgatctgccagctcctcagcaacaacggtctgcacgttgcggcggcccagcgcctgcggcatcacccaaccatgcttaagcgcgtgcgcggcaatctgcaggccaccggcaaaatcaccggcatcgatacgccagaccatcagaaacatcagcacgtcatcctgctgcgctccaccggctgccagaacaccatccgcccaggcggtatatttgggtaacagctccaccttgatttgtgcctttttcactgtggactgcacccccttgaggcggcggcggtcctccgccagctgcagcagcatcaggtcataccccgacgcatggcgaacactgccgccctgacgggcggcctgttcagcctgaacgcgcaggcggtgctgccgtgcgggactcaggctcatgcgttactccccttctccggcgctgaaatcgccaatactgatgttttccaccagtgccacgcagcggtaatcctccaccacatacgcctcgttgacggattcgaagttttcgatgcgatcgcgtttcgggttatcaatgaccgaacggcggcgggtatcttcctgccagtagatggacaggttatccagacgggtgatcagcacggcattagccgggaatgacggggcgcggacagcctgcaggccacccatgcgtttctgactgataatcagatcagcggccagcttttcactgttttcctgctccttattgaccagcgggaaatacttgtcagacagcagctcacgaccacagatcacgaccagatcagcatcatcctggaaaaccgggtcaatcagctcattaacggcatccatcaccagtgcatccaggttggcatatttaccgcccttgcctaccttcaccgggtctgcggtggtagtgccatcttctgccgtggtgctgcccatcacgcaatctgccgcatcttcgcggactttctgcagccagcctttattaacgtcctgcagcagcgggttatcgacacggtttgaggttttggcacgcttcacaccgttgaacccgatcatgatgcggtccagcgcctggcgcttgacgatggcgttacggatgcgcacctggaaatcctggaatttcgcccacaggtcaagttttgcgtaggtcagcactgtatcaaagttggtctgctcgcacttgtactcaacatcaaccatgaccgtcggatcggttggttcgcgttccttcgtggtcgtgtcagtcgtcccggcaatggtgctaccgacgcccagacccagcagctggcctgattgctcagtcaccccaatgatgttaatcatggtcaggaatgcggcggactgctggatctggtcttccagcgtctgctgcacagacggctccacggtgaacttgctggacagctcctcaacttctacgccattcaggcgcgccagctgctgcaggtaggcgttaaaggcaaaacgtgttttctttttcattggttcttatgctccatcagcaattggtcagggtgcctgccggcgcgttaccgcccggcgcgcgctggcgataatctttgcggctgtcttcctgttgcagttgctgctccagttccgcaaaagcggtctgctgctcctgcagggatgtttccagcgcagcaaggcgcttatcctgcgcggacagggattgctcggtgcgttcgctcaggttctgctgctcggtggcgaccagctcaacggcacgatgcacatcagaaaaacgcgcatcatcggtttgctcttttttggtaaacatcgcggtgacgcgggcaaagagggaggttttttcgccctggacctcttcccactcgatcagcgtctcttctgcggcggtaaagaggttttccgggctctgcttgcgtcctgccagcgggttgcttttggcgctggcgctaaactgcagcatttctgtacccaggcttgccgggtcgtcagtcgctgccaggccaaccaggtacgctttgccggtatcagcaaaactggtattgacctccatggaggtgaacagcttttgcagcttgcgggtatacgccaccagatcagctgacggggtgatccacgcatacagggccattttccccttcagcgggccatccgcaatttcttcagcctccagcttatccacggtcccgaaacggcggaatggactgtccggggtgtagcccttgatatgttccagattaatcagcgccgtatagacctgcgggttataactggccgccatctgctccagccaggcgcgctcaatggtgcgcccgtcggttgttgccccttccacaccaatgcggaagcgttttgctttaactgccatttgagcgactccatcaaataactcagtgaggccttatggttgctgtgatggagggggcgaaacaacgcgcagaccttgtgcggtaaaccacacaaaagccagccggggaaaggctcagggcaagcccgtatgtttgtcccatggaaacgatgacccccgcagagctcgatccccgtcggcaggcactactgctgtattttcagggataccgcatagcccgcattgcagaaatgctgggcgagaaagccgcaaccgttcacagctggaaaaaacgcgataagtggggcagctatggtccgcttgaccagatgcagctcaccacggccgcgcggtactgccagctgatcatgaaggagcaaaaagaagggaaggattttaaggaaattgacctgctggcgcgccagtccgagcgccacgctcgcatcggaaaatttaacaacggcggcaacgaggccgatttaaacccgaacgtggaaaaccgcaaccgcggcccccgcaaaccacctgaaaaaaacctgttcagcgacaaacagatcgaaaagctggaagagattttccgcgctggcatgttcgaatatcagcgccactggtgggaagcagggataaagcatcgtatccgcaacgtgctgaagtcccgccaaatcggggcaacgtattactttgcgcgtgaggcactgatcgatgcgctggtgactggccgcaaccaaattttcctgtcagcaagtaaagctcaggcgcacgtgtttaagcagtacatcattgagtttgccaaagaggtcgatgtagagcttaaaggcgatccgatggtcctgccaaacggtgccacgctctattttctggggaccaatgcccgcaccgcgcagagctaccacggcaacctgtaccttgatgaatatttctggataccgaaattccaggagctgcgaaaagtcgcctcgggtatggcgctgcacaaaaagtggcggcaaacctatttttccaccccgtccagcctgacacacagcgcctatcccttctggtctggcgcgctgtataaccgtggtcgctcaaaaacggaccgtgtggatatcgaccttacccactcggcgctggcggctggcctgctttgtgctgatggtcagttccggcagattgtgacggtggaagatgccgtgcgcgggggctgtaacctgttcgacctcgaccagctgcgactggaatacagcccggacgaataccagaacctgctgatgtgtgaatttattgacgatctcgcgtccgtgttcccgctttccgacctgcaggcctgcatggtggacagctgggaggtctgggaagattttcatgcactggcgctgcgtccgtttggctggggcgaggtgtggatcggatatgaccctgcgaaaggcacccagaacggtgacagcgccgggtgcgtcgttatcgccccaccatccgttcccggcggcaagttccgcatactggagcgccaccagtggcggggaatggacttccgcgcccaggcagaagccatccgccagctaacactgcaatacaacgtgacctatatcggcattgactccaccggcgtcggtcacggcgtttatgagaacgtcaaaggctttttccctgccgtccgggagtttgtctataaccccaacgtcaaaaacgccctggtgctcaaggcatacgacatcatcagccaccgccgcattgagtttgacgccggtcataccgacatcgcgcagtcattcatggctatccgccgggccaccaccgccagcggcaaccgtccaacctatgaagccagccgcagcgaagaagccagccacgcagatctggcctgggcaacgatgcacgcactatttaatgaaccgctgcagggcgaagccgccaataccagcaacattgtggagattttttgatgactgagaataccgcacaggatgcgatgccacctgacgtacaacccaatgatgcagcgactacccaggcgttcagctttggcgatcccattccggttctagaccgccgcgaacttctggactacgtagaatgtgtgcaaatggaccgctggtatgagccgccggtgagctttgacgggctggcgcggacctatcgcgccgctgtacatcacagctcaccgattgccgttaagcgtgacattctcagcagtacctacatcccgcaccgcctgcttagccagcaggcttttacccgttttgtgcaggattacctggtatttggtaatgcctatctggaaaagcgcactaaccggctcggtggcgtactgtcactggagccgaccctggcgaaatacacgcggcgcggagttcacctcgacacctactggttcttgcaatacggcatgaccacccagccctatgaatttacgccgggaagcatttttcatctgctggagccagacattaaccaggaaatttacgggctgcccggctatctttcggccatcccgtcaaccctgctcaacgaatccgcaaccctgttccgccggaagtattatctcaacggcagccacgcaggatttatcatgtacatgaccgacgcggcgcagaaccaggaggacgtgaacaacatccgccatgcgatgaaaagcgccaaaggaccgggcaacttccgcaacctgtttatgtactcgcccaacggaaaaaaggacggcatccagatcatcccactgtcagaagtagcggcaaaggatgagtttctgaatatcaaaaacgtcagccgggatgacatgatggcagcgcaccgtgtccccccgcagatgatgggcattattcccaacaataccggcggttttggtgacgttgaaaaggccagtcgtgtctttgtccgcaacgagctgataccgttgcaaaagcgactgcaggagcttaatgactggctgggtgaggaagtgatacgtttcgaaccgtatatcttggatattcaaaaagaaaatcaataaaacgcttaacaaataataatcattatcataggccgcagaattagcggccttattcattaccaatttcttttttcggagtttaaccaatcagcgcatggataatttcttgacgcccattctctttgtaaacgagctacaaacagaatatcgttactatcaaccctagatttaagtccatcgcgcagttgggctgcggttaaagttgtatctattaaccaaaacgattcaagatgcttacaatatgtaaaattttttagatagtcaaaaacttcatcgtagtttcttcccggcgccttcagatcataggtaacgcaataaatagccatcttcatgctccgcattttttgtcatttggggagcattttagactacgacatctacgacaatacgattgcgggatcagacgctcaccttccaccgttctaaaaccaaatacttcttcaattttattcaaatcaccacctgcaacgacgctacaacaaggacagacagcttcgacttggtatgtcatgttcatctccattacacgtgtttaatgtagggtaactaatcagccgcaacaaaaatgagacatggctccagaaaccttacataaccccgctagcgcgcgctcgtatccccgccacgcctgcccgctttgtgtagtggttttcatgcacctgcatgacacaggcgaaagcccgccagaactggcgggcccgagcagaaatgatccttttgcgatcattcattttcatgcgctatagtcatgcaacaaacacatacgaaccatatggttagattactcatcaagtcagatggattttcaggcagattgccacagcaattgtaaaggagcgagattgaaatgggtggagagacttcggctatacaacgagtcgcgggtaagatttctgatgatattttctcagtattcaaatgggatcgtgccgctagagcggatatgaattgggattgttgccaagaggctcattctaagaaaacgcatccaagcgatgttgtatttttctacatagatccatatgaggaggaaatggtctatctcaacacagacctcaaaagctatgcagaaggtactattgggaaaaaaatagtcgagggagctttaacatcgcttgctttagctaccgaatgtgcaaatgtgagtgaagaatggcgattgaaatatgttcatgatgattctttaggttataacgtaagagggttattattcttatataaccatgataacttatatgacaaggacttttatgagaatattacgaaaaagttagaccactcatctataaattgccctccaaacatcaaactacatttacttgacccttataaaatatcagatttgataaacatatcttctgacataaccaaattaattggttcaggaaaacttcctcaacctgataagttcacatattattacccagatctttcactaacacgaataaaacaccctattaatcaggcaacacccgcaacaattgaattattaacatcaccatacattataataaagcatgaggcttttagttggctcagggataaaaatcctgaaggatatgttgtttattataatcaacctggggattcagtagacgaatttgtttacttctttgatatgttatcaacttatcagatactaaccgaaggtaaaccaatcgtattacgccattgttacattcatccaaatgaaaatgccattcatcactttgaaagagcgaaaaagaaatacagcacagactggctcttaggcgaggatgaaagactttttcttaaaatcgacttcgacaagacagacaaaattgttgttgaatataatcttgaaaaaatcggcatggagcaacgataatggctaaaaaactatatttcgcaactgacaaaaatatttatgatgcattgcatcataaaaggataaccgctgcaaaattgcatgaattattgttgaatagaggtgtgtttttatcaccagaactcgacaaggaaatactaattgaggaaatatccaaacttcctcacggatttaatgaattagaacacataaaaaaactggtcaaaacatatgacccaagagaaagcactactagtgtaagcttccaaacctcaacaaatcaggccgaattaataagtgcagctgaagcactaaagaaaacatgctcacctagggaaggtgcgaacaagttcctgatatgagatcatcatattcatccggagcgcatcccagagggacatcatgagccatcaactcaccttcgccgatagtgaattcagcactaagcgccgtcagacccgaaaagagattttcctctcccgcatggagcagattctgccatggcaaaacatggtggaagtcatcgagccgttttatcccaaggcgggcaatggccgacggccctatccgctggagaccatgctgcgtattcactgcatgcagcattggtacaacctgagcgacggtgccatggaagatgccctgtacgaaatcgcctccatgcgcctgtttgcccgattatccctggatagcgccctgccggatcgcaccaccatcatgaatttccgccacctgctcgagcagcatcaactggcccgtcaattgttcaagaccatcaatcgctggctggccgaagcaggcgtcatgatgacccaaggcactttggtggatgccaccatcattgaggcacccagctctaccaagaacaaagagcagcaacgcgatccggagatgcatcagaccaagaaaggcaatcagtggcactttggcatgaaggcccacattggtgtcgatgccaagagtggcctgacccacagcctagtcaccaccgcggccaacgagcatgacctcaatcagctgggtaatctgcttcatggagaggagcaatttgtctcagccgatgccggctaccaaggagcgccacagcgcgaggagctggccgaggtggatgtggactggctgatcgccgagcgtcccggcaaggtaaaaaccttgaagcagcatccgcgcaagaacaaaacggccatcaacatcgaatacatgaaagccagcatccgtgccagggtggagcacccgtttcgcatcatcaagcggcagttcggcttcgtgaaagccagatacaaagggctgctgaaaaacgataaccaactggcgatgttattcaccctggccaacctgtttcgggtggaccaaatgatacgtcagtgggagagatctcagtaaaaaccggaaataacgccagaaatggtggaaaaaatagcctaaataggctgattcgatgtgtttgcgggaaaaaaatcggcccagatccgcgaaattttaatcagcgagtcagcttgggaagaaatgacctgcttattcgcaccttccttgttacatttaaatccacgccgggatcgcggttttttatcccccccctggaccgcacataaagtgcaacaattattcttgcacttagttaagcgccttcctacaatcgccgcgatagtgtattcgaaattgttacagttttgtggcgatgatcgacacaaatggccttaagccagcccggacaaaggaagtggcgcggcttctcacgctgcgtcttgcccggcggctacatttaccggaataaaaataatgagcctgcaaaaaacctggggaaacattcacctgaccgcgctcggcgcgatgatgctctcctttctgctcgtcggctgcgacgacagcgtcgcacagaatgctgcgcctcccgccccgacggtcagcgccgctaaggtgctggtgaagtcgatcagtcagtgggatagttttaacggtcgcattgaagcggtggagagcgttcagcttcgccctcgcgtctcgggatacattgataaagtgaattacactgacggccaggaggtgaaaaagggccaggtgctgttcacgatagatgacagaacctatcgcgccgcgctggagcaggcgcaggcggcgttggcaagagccaaaacgcaggccagcctcgcgcaaagcgaggcgaaccgcaccgataaattagtccataccaacctcgtctcccgtgaagagtgggagcagcgccggtcagccgcggttcaggcgcaggccgacattcgcgccgcgcaggcggcggtggatgccgcgcagcttaacctcgacttcaccaaagtgaccgcccctattgacggccgcgccagccgggcgctgatcaccagcggtaacctggtcaccgcgggcgacaccgccagcgtgctcaccaccctggtctcgcaaaagacggtgtacgtctactttgacgtcgacgagtcaacctacctccactatcaaaacctcgcccgccgcgggcaaggcgcgtccagcgataatcaggcgctcccggtggagattggcctggtgggcgaggagggttacccccaccagggcaaagtggattttctcgataatcagttaacgccgagtaccggcaccatccgcatgcgtgcgctgctggataactcgcagcgtctgttcacgccggggctgtttgcccgcgtgcgtctgccgggcagcgcagagttcaaagccacgctgatcgacgacaaagcggtactgaccgatcaggatcgtaaatacgtctatatcgttgataaagatggtaaagcacagcgccgcgacattaccccagggcggctggcagacggtttacgcatcgttcagaaggggttgaatcctggggatagcgtcatcgtcgacggcttacaaaaagtgtttatgccgggtatgccggttaacgccaaaaccgttgccatgacctccagcgccacccttaactgatccctaatcagagaatccaagacatggacttttcccgcttttttatcgacaggccgattttcgccgcggtgctgtcgattttaatttttatcaccgggttaatcgctatcccactgctgccggtgagcgaatatccggatgtcgtcccgccgagcgtccaggtgcgcgcggagtatcccggcgccaacccgaaagtgattgccgagaccgtggcgacgccgctggaggaagcgatcaacggcgttgaaaacatgatgtacatgaaatcggtcgccggctccgacggcgtgctggtcaccaccgtcaccttccgcccgggtaccgacccggatcaggcgcaggttcaggtgcagaaccgcgtcgcgcaggccgaagcgcgtctgccggaggatgtacgccgtctggggatcaccacccagaagcagtctccgacgctgaccctggtggtgcatctgttctcccccggcgggaagtacgactcgctgtatatgcgcaactacgccacgctgaaagtgaaggatgagctggcgcgcctgcccggcgtcggccagatccagatttttggctccggtgaatatgcgatgcgcgtctggctggatcccaataaggtcgctgcccgcggtctgacggcctcggatgtggtgacggcgatgcaggagcaaaacgtccaggtgtctgccggacagcttggcgccgagccgctgccgcaggagagcgatttcctgatctccattaacgcccagggccgtctgcataccgaagaagagtttggcaatatcattctgaaaacggcgcaggatggctcgctggtccgcctgcgcgacgtggcgcgcatcgagatgggttccggtagctatgcgctgcgctcccagctcaacaataaggatgcggtcgggatcggtatcttccagtcacccggcgctaacgccatcgatctgtcgaacgcggtacgcgccaaaatggccgagctggccacccgcttcccggaagatatgcaatgggcggcgccgtacgacccgacggttttcgtccgcgactccatccgcgcggtggtgcagacgctgctggaggcggtagtgctggtggtgctggtagtgatcctgttcctgcagacctggcgcgcgtcgattatcccgttgatcgctgtgccggtatcggtggtgggtaccttcagcattctctatctgctgggcttctcgctgaataccctgagcctgttcgggctggtactggctatcggtatcgtggtggacgacgccatcgtggtggtggagaacgtcgagcgtaatatcgaagaggggcttgcgccgcttgccgcggcgcatcaggcgatgcgtgaggtctccgggccgattatcgccattgcgctggtgctgtgtgcggtgttcgtgccgatggcgtttctctccggggtcaccggccagttctacaaacagttcgcggtgaccatcgccatctcgacggtgatctcggccatcaactcgctgacgctctccccggcgctggcggccctgctgttaaagccgcacggcgcgaagaaagacctccctacccggctgatcgatcgcctgtttggctggattttccgtccgtttaaccgctttttcctgcgcagctcgaacggctatcagggactggtaggcaaaacgcttggacgccgtggcgcagtgtttgcggtgtacctgctgctgctctgcgccgctggggtgatgtttaaagtcgtccccggcgggtttattcccacccaggataagctgtatctcattggcggcgtgaagatgccggaagggtcgtcgctggcgcgcaccgacgcggtgatccgcaaaatgagcgagatcgggatgaataccgaaggggtcgactatgcggtcgctttcccggggcttaacgcgctgcagttcaccaacacgccgaataccgggacggtcttttttggcctgaaaccgttcgaccagcgcaaacacacggcggcggaaattaacgcggagatcaacgccaaaatcgcgcaaatccagcagggctttggcttttccatcctgccgccgccgattttaggtctgggtcagggttccggctactccctgtacatccaggatcgcggagggctgggctatggcgcgctgcaaagcgcggtgaatgcgatgtccggggcgattatgcagacgccggggatgcacttcccgatctcgacttaccaggctaacgtgccgcagctggacgtgcaggtcgatcgcgataaggcgaaagcgcagggggtatcgctaaccgatctgttcggtacgctgcagacctatctcggctcgtcttatgtcaatgactttaaccagttcgggcgtacctggcgcgtgatggcccaggctgacggaccataccgcgagagcgtggaagatatcgccaatctgcgcacccgcaataatcagggcgaaatggtaccgatcggcagtatggtgaatatcagtaccacctacgggccggatccggtgatccgctacaacggttatccggcggcggacctgattggcgatgccgatccgcgggtcctctcttcttcgcaggcgatgacgcatctggaagagctgtcgaagcagatcctgccgaatgggatgaatattgagtggacggatctcagcttccagcaggccacccagggcaacacggcgctgatcgtcttcccggtggcggtgctgctggcattcctcgtactggccgcgctgtatgaaagctggaccctgccgctggcggtgatccttatcgtaccgatgacgatgctctccgcgctgtttggcgtctggctgaccgggggcgataacaacgtcttcgtgcaggtgggtctggtggtcctgatgggcctggcctgtaaaaacgccattctgatcgtcgagtttgcccgcgagctggagatccaggggaaaggcatcatggaagcggcgctggaggcatgccgcctgcgtctgcgcccgatcgtgatgacctccatcgcctttatcgccgggaccattccgctgatcctcggccacggcgcgggggcggaagtccgcggcgtcaccgggatcacggtgttctccgggatgctgggcgtgacgctcttcggtctgttcctgacgccggtgttttacgtgacgctacggaaactggtgacccgcaggaagccggtccaggaggatctgcccgcctagcctgcagcagataacaaaaaaaccgccttcacaatttgaaggcggttttttttcgtcaccagaaaatgattaatgcgcttttttaaagcgggcgatcatttccggcaccgggtcgcagccgctggtatcggcgtttttgaccgcctccagcgcgctggccgcggtatggcgagcgaggacgtttaacgaagcctgctctgcttcatcggcaaccgatttgaagtaccagcaggcgttggcgctgaccacgcagcgggccgggacgtcaggacgcgacgcccacagttttttatcttcgataaccgaaagatagatatcacgcagggtgatcttgtccgccggacggccaagatgaattgagccgttgcgaccaagcgtggagacgataatgccgtcacgagttagcggaaccattagtttacggataaagctcgggttcgcttccaggccgtaggccagaatcgcactcgtcgaacgttcacccatctgctccgccattgctacgctgagaaccatctgcaaagctgtcgggaagcggtaatctaacatggcagtgtcctgggttgcggtgaatcttgttctttttggcaccgcagaggtgaataatcaatgaacaacaatataacaaatacgggaatttttttgaagcaatctgcggttagcctgcgaagtaaattttctgatttcacgggcaaaggcggggcaaacacagattccctttcgtaccgttttatttaacgcaaacgccatcctttgttccgctagccgcgccctgtcgccccgcgacctgtccacaccagcggcgcctaaccctgtggataacctggaggcagttgcctggcagccgcagcccgggcgggctaccggctgccgttcgttttttgaacaggggacatacccccgccgggcagcgcgctaagcgcgaaaatcaccaccccggcacagggaagcgcccgccccgcttaataattccacttcggccgcgccaccgtgtttttcttcagcaggtcgcggaacgctttcaggtagggctcattgctgcgcccgcgcttacagatggccgagaacggcgactgaaagccaaactcgttgggcagcagcacccgcaggcggttctctttgatccacggccaggcgtaatgctccggcagatagccaatatatttccccgagaggatcagcagcagctgggcgtcgacggtctcgacggtggcgctccctttgctgaagccccgacggcggagatcgctggtgttccagtagctgcgggtcaccagcgggcactggctgatctgctctttatcgagctggcggctgaagaacatcgggtgcagatcgctgcagtagagccagtgctgttcacggtacagcggctcgctgatgatgttatgcacctgcgagttgtagctgccgatagccaggtcgatatggttgttcagcacgccgttcagttgctccgccggggtgcggataatcagtttgatatgcacatggggaaatttgtcgctgaagctgcgcagaaccaccggcagcgagagcgccgtttcggtctcgatggagtcgagcgtcgagatgcacagggtgccgctgtgctcccctttgagcagcgccgactgccgctccagctcattgagttcgctcagtacgcggatcgcctgctgtaaaaactgctgacctttctcggtcagagaaaagccgccgcgcccgcgctggcagagggtgaagccgagctgtccctctagctgcgacatggcattgctgatggcggagaccgaaatacccagctcctgctgggcccggctgtagctctccaggcgggccaccgcctcgaaaacctgcagctggcgaatattgaggctggcgtcgtgatgcatcgtatttagttcaccaataaatgaactgagtatttacgccagacgatgtaaagtccagcgcgggttgcgcactatctctcctgttacgtttcatccgtcagattcaggagcagacatggataacctctttcaccaaccgcagggtggcaatgagatgccacgcttcgccggacgcgccacaatgatgcgcctgccgtttatcgaagatttacagggacttgacgcggcatttgtcggcattccgctggatatcggcacctcgcagcgctcgggcacgcgctacggaccacgctatattcgcgccgaatcggtgatgatccgtccgtacaatatggcgaccggcgccgcgccgttcgactcgctgtcggtggctgatatcggcgatgtgccgatcaatacctacagcctgctcaaatcggtgcaaattatcgaagattactacaccggtttgaatagttatccgctgatcccgctgaccctcggcggggaccacaccattaccctgccgatcctgcgggcgctgaccaaaaaacatggtccggtggggctcatccacgtcgacgcccatacagacaccaatgatgagatgttcggagagaaaatcgcccacggcaccaccttccgccgcgccgtagaggagggactgctcgacctcaaacgggtggtgcagattggccagcgcgcccagggctatgccgccggcgacttccagtggggcgttgaccagggatttcgcctggtgcaggcggagcagtgctggcatacctcgctggcgccgctgatggccgaagtccgccagcagatgggcgacgggccggtgtatctcagctttgatatcgacagcctcgatcccatctgggcgccgggaaccgggacgccggaagttggcggtctgagctccattcaggcgctggagatcgtccgcggctgccgcggcctgaacctgattggcgccgatctggtcgaggtctcgcccccctacgacgtgagcggtaatacctcccagctggcggccaacctgctgtacgagatgctctgcgtcctgcccggcgtgaagtacgcctgaggaagccgccatggagctgaaatgctttcgcaccctctggggagtgacgaccccctggccgcaaacgctggatgaactgcagcgcgtcggctgctgcggtatcgaagcccgcgtgccgttaacggtggccgagcggcggcagctcgccgaccgcctgcaggcgtcggggctggagtatatcgccattcttttcagcggcggcggggtgctccccgcccagcatgaaacgcccgagcagcatctggcgcgcctgcagtcccgcttcgccgaggccagcggcctcaacccgcgctttgtcaatctgctcgcgggcaacgatcgctggccgctggcgcagcaagtcgattttctcggcaaggcgcatgagctggccgccgggtttggtttgacctgcagctttgaaacccatcgcgccacctcgctgtacagcccgtggctcaccctggagatcattcagcagctcccccagctgcgctttaccgccgacatcagccactgggtggtggtcagcgagcgcctgctggatgaccccagcgatgacttcagcgcctttatcgaccgcgtgcatcacgtgcaggctcgggtgggctacgaccaggggccgcaggtgccgcacccggcggcgcctgagtatcagccggcgctggcttttgccgagcgcttctggcagcaaatctggcgttcgcagcgccagcgcggctacccgcagaccacgctgaccccggagtttggcgccgacggctatctgcaccatctgccgttcaccaacgttccggtggccgatctctggtcgctcaacgcctggatggccgcgcgccagcaggcccactttcagcagtttttatcgctcactgaacaggaaccgcagccatgaccgccgtgaagcacgcttttactgaactcccgaccatcgatatccgcgatctggccggcgatgacctcgccaggcgtcaggcggtggccgacgccatcggccgcgcggcgcgcgaggtgggctttttctacatcaccggccacggtatcgacccggcgctgatcgccggcatccgcgaggcggcgaagcagatcttcgccctgccgatggaggagaagatgaactattacatcggccactccaaaagccataagggctacgttccggaaggagaagagatctacggctccggcaagccggaccataaagaggctttcgatatcggcttccaggcagcggatgaccatccgctggtgctcgccggtacgccgctgatcggcgccaacgagtggcccgatctgccggatttccgcgcgcgggtgctggcctactacgacgcggttttcgccctcggccaccgtctgttcgacgctttcgccctcgcgctcggcctgccggaagggtatttcaaaccgatggtgacctgcccgccggctaagctgcggctgatccattacccgttcgacgccagcgtcgaagatgttcccggaattggtgcacacaccgactatgagtgcttcaccctgctgctcgctgaccagcccggccttgaagttctcaatgaagaaagcgtgtggatcgatgcacctcccgtcaaaaacgccgcaggagaagaggcgttcgtgatcaatatcggcgacatgttggaagtgctcagcgctggcacatttgttgctacagcccaccgggtgcgcaaagtgccgcaggagcggtactccttcccgctgtttttcgcctgcgattaccacacgctgatccgcccgctgccgacctttctcgccgccggcgaagccggtgaatatcaggagctcagcatcggggagcatatgtggagccaggccctgcaaacctatcgctacctgcgcgaaaaggtcaatcgcggtgaacttcagctaccggagcgcgcgcgcggcaccaatacgtttggccatttgaaaaaacaggctcagcaaaaaaacccctaaccacccgtgaggatccatgatgactagcaccctgaaaaaaatctcgcgccatgtcgcgcttaccctcgccgtcagcgcctgtttttcccctgtcacccaggcggcggaactgctgaccgagggcgtctttaaggtggggatggaggtcacctacccgccgtttgagtcctatgacagcaataacaatatcgtcggtctcgacccggagtttgccgcgctgatcgcccaacatctgcaggccaaaccgcagctgatcgacaccaagttcaccagcctgatcctcggcatcggcaagaaatatgacgcggtgatctccgggatgtacgtgacgccggagcgccagaaacaggccgacgccatcccttacgccctctccggcgcgtcgatcatcgccctgaagggcggcgcggtgcagccgaaaaccgaagatgagctgtgcggtgtgaaggtcggtctgcaggcgggcaccacctgggtgaccagcctgaaaaaacactccgatgagtggtgcctgaaaaacggcaaaccggccatcaccattcaggagttcccgacggcgccggaagcctcccaggcgctgctgtcgaagaacatcggcgcccagcttgagattgccccggcggcgcagatcattgtcgacaagagccgcggccgcctggcgataagctctacgcgcctggtctacccgctgccgctggggatctacgtcgccaaaggcaacaccgagctggcggaggcgatcaaggccaccctggccacgctgaaggccaacggccaatatgccgcgttgatcaaaaaatacaacttagaaagcatcgattaagacaataagcactgcgcaacaggagtcagtatggcgttcgattggggatactttttttcattgtttagcattggggcattctggcaggcgtgcgtgaccgtcatcgtaatcagcaccttgtcctgggggatcggcctggtggtcggttttctgttagcctgcgcgaagctctcggcgccgcgctgggtcaagatccccgtcgaactctatatctggttttttcgcagcgtgccgctgatggtgctgctggtgtttgtctacaacctgccgcagctgtttccggtgacccagccgctgctcggggtgccgtttatcgccgggctggtgtcgatgaccgtcaccgaggcggcctatatggcggagatccaccgcggcgggctgctgtcggtggccaaggggcagagcgaggcgggccatgcgctgagcttcagctttatcggcatccagcggctgatcgtgatccctcaggcgtttcgcatctcgctgccgacgctgatcaatgaatacatcaccatcattaagctgagctcgattctgtcggtagtctccttacccgagctgctgctcaccggccagcgcttgtatgcgcagaatttccttgtgatggagaccctgctggcggtagcggtgtactacgtgatggtggttaccgtcttcacctggctgttccgggcgctggaaaatcgtctcgatattcagcgtaagcgtccgcaaaccctcagcgaggcggaatgccaggcgctgcgccagagcctgccggcgctgagcgaagagagcaacaccccggccgtcaatggcgcgccgccggcgctcgatctgcggggcattcgcaaatcctgggggcagcatgaggtgctgaaaggcatcgatctgcaggtggagaacggggaggtgatcagcatcatcggcccgtccggctccggcaaaaccaccctgatccgcaccatcaacgccctcgaaagccttgatggcggggagatcattctctacggcgaggactatcttaagggcggagctatcgtcgacaaacgccagatgcgcgccggggtgcggcgcatcggcatggtcttccagagcttcaacctgttcccccaccgcacggtgctcgacaacgtgatgctggccccgcgctatcaccagctgctggaccagccggtcgcccgcgagcaggccctggcgctgctcgaccgcgtcggcctgctggcccatgcccacaagtaccccggacagctctccggcggccagcagcagcgcgtggcgatcgcccgggcgctggcgctgaagccggacatcatgctgtttgacgaaccgacctcggcgctggatcccgagctggtaggcgaagtgctgaaggtcattcagtcgctggcccgcgaaggcatgaccatgctgattgtcactcacgagatggacttcgccctgtcgatttccgaccgcgtggtgctgatggagaacggcgtggtgcaggccgatatcgccccgcaggtgatccgcagcccgctggaggcgccttctctgcaacgaatccgtgaatttatgggagtacgctaaatggcaaccgagcaacacctgcgccagcagctggccgccgcctaccggctggcggcgctgttcggctgggaggataccctctacactcacttctccgtgcgcctgcccggcgacggcgagccgcgttttttaattaatcccttcggcatgatgtttgacgaagtcaccgccagcaacctgatcgtagtggatatgcagggtaaggtcgtagagggcgacgcgccggctaactcggcgggctttaccatccatagcgcggtgcatatggcccgggaagacgcccactgcgtgatccacacccatacgctgccggggatggcggtggccgcctgcgaggatggcctgctgcagctcaaccagatcagcaccgaattttaccagcgcgtcggctaccatccctatgaaggggtggcctttgacctcgacgaacgggcgcgcatccagcgctcgctggggaataatatcgccatgatcctgcagagccacggcctgctgtcggtgggccgcaccgtggctgacgcgttttacatcatgtactacctgaaccgcgcctgcgagatccagatggccgccgcccagctggcggccctcagcccgatccacaccatcgctccgcacctcagccagcacgcctgcgagcagctgatgggcgtggagcatgaacgtcaacaggtctggcaggcgtggctgcgccgtcttgaccgtctcgatacctcttacaaagactaacgcctatgtctgatatcactatcgtggtggattgtaacgacgcggatttcgcccgcgatatctgcgccgccctgcagcagtttcccgacgtcacggcgcttctgccccatcaccaggcggtgcgcgacgcccagtacgccagctgctggttcccggacccgcagctgttgacccgttcgccggggctgaagctgatccaggccgcgtccgccggggtcgatcatctgccgcccgcgctgttcgccagcgagatcccgctgtgccgggtgatcgatgaagattttcgccacggcatgttcgaatatgctctgtggagcgtcctgtggtttcagcgccatttcgaccgggcgctggcccaccagcgaacccaaacctggaagctctatccccagcgcgccgccgccgacttccatatcggcattatgggtctgggcgaaattggcggctatatcgctgaccagctggcccgcctcggctatcgggtctccggctggtcgcgcagtgaaaagcagctgactggtgtcacctgctatcgcggcgaggaggcgctcgaccactttcttgggtcgcttgacgggctgattaacctcctgccgctcaccgcgcagacccgaggtatccttgccgcgccgctgttcaaccggctacccgccggagcggtgttgatcaattgcggccgcggggagcatatggtcaatgacgatgtgctggcggcgctggagagcggccagctcgccggggcggtgctcgacgtcttcccgcaggagccattgccggcggacgatccgctgtggcgccatccgcaggtggtcatcaccccgcatatggcctctgcggcccctgccgaggtgatcgcccgccagttgctggagaacattcagcgccagcgccgcgggctgccgctgaagaacctggtcaataagcacgccggttactgatccccagccatactgccgctgctacgcttaatgggagatccacaaccagaaggcaggaacatgaagattgatttagcgggaaaagtcgcgctggtcaccgcctccacggcgggtattggcttcgccatcgccaaaggcctggcggagagcggcgcagagatcatcattaacgggcgcagcgagcagagcgtgaacgccgccatcgctcgtctgcaaaatgaggtgccgggcgcgaaggcgcgccccgccatcgccgacctcagcgacgccgacggcgcagcgcagctgctgcgggccgtgaccggtgtcgatattctggtcaataacgccggaatctatggcccgcaggatttctacgccaccgacgacgcgacctgggacaactactggcagaccaacgtcatgtccggcgtacgcctgtcgcgggggctgctcccggcgatggtcagtaaaggctgggggcgggtggtgtttatctcctcagaatcggcgcgcaatatcccggcggacatgatccactatggcgtcaccaagaccgcgcagctgtcgctggcccgcggcctggcgaaatatgtcgccggcagcggagtgaccgttaacagcgttctgccagggccaacgatttccgacggctttgccgaaatgctgaaagacgacgtggcgaaaaccggcaagtcgctggaggaacaggcgaaagcgtttgttatgacccatcgtccgagctcggtgatccagcgggcggcctcggtggcagaggtcgccaatatggtggtctacgtctgctcgccgcaggcgtcggccacctccggcgccgcgctgcgcgtcgatggcggcgtggtggatgatattctctgaatcccctttatgcaggggagccccctcccctgccgccttccagggcgctaaaaagcgcaaaatgttaaaaaacagccgcaaagtcgcacaaagtgaacaggaacatgtattcccaaaacttatgatatttgttttaaatataagttgtggtgtaaatgtctctgttacgaagcttgctattctttctcggcgcggcggtcgcggccgccctcgcggtactctgcctgtgggtggatattcgggtgtttggcaacgacatcccggaagtgtcgctcaccgaagtggtccaggagagcgtgctggccgttatcgtgctggttcatctgctgctggcgcggaaatatgcccacttgcgctatagcaatatcctcatcggcggcttctttctcgccatgctgatccgcgaactggatggcctgtttgatttactctcccacggcagctgggtgtggtttgccctgctggccaccgcggggtcgctgctgttgccgttgcgccatctgcgtcagaccctgtcgcagctggcggagtatacccgcaccccgtattacgggatgatgattagcggcctgctggcgattctggtcttctcgcggctgtttggcatgcacggcctgtggtacgccgtgctggaagagaactacgcccgggtggtaaaaaatacggtggaggaaggcagcgagtcgtttggctatatgctgtgtctgaccgccaccctcggctacgcctgctactttcgcggtctggcgcgacaggcgctgtcgccgcagcgctaaccgtggacgatagccaccgccggacatatctgccggtggtggcgcgccgccgcggttaaccgcgaattttccacttccgtttgagaacctctttgtcctggctatccagccactggttcactttctccagcagcgccgggttatctttactcatcatatacaccttgttgctggcggtaccggcgaacggcgtttcgttagcaacgcagaacacgccgggctctttgctctggtaatagtcaccttcaatcagatcggtcaccatcatatcggccgttttctgccgcagcgcctgcaggttatcgacattgttctgcacgcgaataatttgcgcctgcttgatgtgttcatcgacaaaactctggtttgtgccgccagggttgacgatcactttcacgtccggacggtcaattttttccagcgaaccgagccgcggggcggcctggcagttggctaaggcgatttttccgttcgccaccaccggatggctgagggcgaaggcttgcgcccgcgccggggtctcggtaaccccacccatcgcaatatcaaacttgtccgcctgcagatcggcggcgagcgcgggccagctggtgtagacgaagctcaccttgaggccgagcgtgcgcccgagatcgcgagccatgtccacgtcatagccctgcagttcgccggcggcattgcgaaacgccagcggcgcgtaatcgcccggcacgcccaccttcagttcaccgctgtgctcgatggattgcatatcgcgcgcctgggcgccgcaggtcattatcgccagcgtcagcgccagccccaccgtcagtctcatttcgccatccttaaagttatcgtttttcatgccagagtgaccggccgcatcagtcacagtatccgcagtgcgagccagggcattcatcctatttttaaacaccgggacatacaacccgacgtggggcaaaacgttaattaatcctctttctcgctgtgagcttgctggttgttttgactttcagtaaaatgccccgcagtgcattcatattttattcctggccatacgtttaatatattatttattatcgtttttttaccttcctcttatgcgttaatagttgaatattaaattataaccttctgattaataagtaaaaacacttcatgcaacaactttcgttaggatttttctaatgatcctgcttatcatcttatttactcccctcctctccagcagtaatacttggttacagaagcagtgtataaggaaatacattatgattattatcatttccgccaataagttttttattaacggcatccggtctctggttaacatgaccatgagtgctcaacgtcggtatagtcaaacattgtttctggataatatttctgacgtgaatgataaaagtctaaccatagccagaaccattatcgtggactatagccacccggacattcaacaattagccgcactgctctatcgtaaaaaaaagatcattcatggcgatatcgtttttgtcgttaaaagtgagattcttgccgatccagtcgaaaacattatcataaactctatttcgacgatcgtgcttgattatatagatgttacccaacggctgcagaaatacttacagaatgcgtctgatcatcgctgtattaaagtgttcagaaaatcaattagctcgctggacagttgtgtcaatattaaacttacgaaacaggaggactctcttctcccctatatcatctcaggtttaaataataagaaaattgctcaggccaccgaccttagcaatatgatgatcagtcactatcggagaaacatctaccagaaactcaatgtccgcaatattgcaggcctgtatcatttcctccactccctggaggggggataagttcgctttatggctatcacaacaacagagctaacggcttatgcagcgtcaatgagtatgcctggctattagcttccctgggtcacaacagaaggaattggctatgaaaatgaaatcactttgcctggcaatggcactcgtcggcttgacctcacactatgccgccgcggcggacggtacgctgtatttttcaggtacaattgtcaactcaagttgcaaactggcaagcggcaatgagaagggtctcattgaagttaagatgggcgctgttccgctgtctaaattaaaaaatgataccaatggcaccgggccagaagttggggtcaatattagcgtcaaagattgtgaagcgggcacgtactatattgtgctcgacggtgcttcagccaacgaggcgcctatcactaacgtactggctctcgatgcgggtaatcctacagctaaaaaagtcggcattaagctaaccgaccgcaataataccccggtcacgctcgataaacctttcgatcccaacgtcgacccgagtattacggtcaatgccgatggcaccggtaccttcaacctgaaagcctactactatacctgggataaagacaacgccgaagctggcgacggcaatgcgaccgccaggtttaccattatgcaggaataacacctggccagggacggcacgtcgcggataaggggtaacatatgaaaacgctgctggcagtgatcataggcgctttggcttttcagacccaggcggccattaccatcgatgcctcacgggttatttatttgggcaaagataaatcggccagtctgaaaattaacaaccgaagcagcaaaaactatatcgtccagacctggcttgatacgggtccggagacccccagcagcggcttacccattgtggccacgccgcccctggtcaaattacgccccgagcaatcggcacaactgcgctttatttactcaggaaccggtcttcctgccgacagggaaagtctgttttgggtgaatattcaggaggtccctcctgcgcctgaggaaaataacatcctgcagttcgcaattcgcactcgattaaaactattttatcgcccgcaaggaattgccacatcgctgcccaaagccgttgaaaatctgcagtggcagcaaagcgctaacacgttatcttttactaacaacagtccactgcatattacggttattaatgccgaggcgatcgacaacaaaggcaaaatctatcctctgaaaaactttatgttgctgccgtacagtcatcacgctgtcaatatcgccagcatgcagcgcttgcataaaatgaaatatattaatgattacggcgccgttgttgatattccaataaaaaaataaacgtcgcacctctttagggagatagagtgatggacgatagtaaattacgctattttgccagcgcatggttaatctccatcacgttaccggcagacagcgcggaacgctataatgcccagtttgtgaacggcatcgacccgctggcttttaatcagtttgtcgccagcgatggcgacgtcatgccgggcacctatgacgttaatatttacattaacgatctgctggtggatagccgccccgttcgcttctcagaggatagcgcacacggcgggttggccccctgcctgagcgcggcggaatatatccgctatggcgtcaagattgacgatgaccaccagccctgtttcgcgctgtcgcagacgatccgccaggcagagcaacagctggatatcgctaatcatcggctgatcatacatatccctcagcaatatattgagcactatcctcgcgactatgtttcccccatgcgctttgatgaaggtattaacgctgctttcgtcaactacagctattctaccgatgccaataatggcgacgggggcagccaccagtaccaatatctttcgctaaacagcgggatcaatattgcatcgtggcgattgcgcaataatgcctactggaataagttcagcggccaggcggataagtggcaaagcatcgccagttgggcggaaacgaacatcattccctggcgcagccggcttgtcgtcggccagaccagtaccgacaacagcgtcttcgatagcgtccagtttcgcggcgtacagcttggcaccgatgtcgaaatgcgccccagcagccagaccggcttcgcgccggtcattcgcggtgtggccaacagcaatgcccgggtggaagttcggcagaacaactatctgatttacagcgagaacgtcccagccggtccctttgagctaaatgatatcagcgccgttaaccgcagcggtgatttctacgtgaccgtcattgaagccgacggtagccagacgacctttactgtcgcctacaccaccctgccacagctggtgcgggcaggccaatggaattatcagctgtcggcgggtaagtatcatgacggcgctgacggctatgcccccgccctgatgcaaagctcgctctcttatggcctgaataataccttcacactatacggtggcgcccttgcagcggagaactatcgcgccggcgcctttggcgtcggtagcaatctgggggagattggcgccctctcagccgactatacgctggcgggaacgacgctggcgaatggccagcgcaagcagggagggagcgtgcgttttctgtatgctaaatcctttttatcaagcaagaccgactttcaaatcgcgggctaccgttactcaacggcaggttattatagcctcagcgatgcggttaacgagcgtcgacgctggcacaatggcctgtacgaaaatgattactggccctctgacgaagacgaaagctggctggcaagcgctccccaacactattacacgtcctggttttataataaaaagcatcgctttgatatttctgcccggcaaactctcggtaagaacagcgctttcttccttaacttcagccagcaaaattactggaatagctcaggaagcgatatctcgctgcaggcgggctttaacagcactatccataacgtgaactatggtctgtactatcagaatacgcgcagccacttcacccatgacgacaatagcatcacactgcgcgtttccatcccttttactctgcaagaaaaccgccggatcaataccgcatttaccctcgcccacagtaaatcgtctggcacgtccgggcaggctggggtaaacggcacgctgctcgatgatggtcgcctgagctgggccgtcaccagcgcctatgatgacaccagccatagcaccaacagcgccagcctgggttatctcggccagtacggtaatctgtataccggctacgcctacagcaaaagccatcgtcaggcgagtctgaatctgagcggcggcgtggtggcgcaccgcggcggcgttaccctctcgcaaccgctgggctcaagctttgcgctagtggaggccaaagacgctcagggggtagggatagagaatcagaccggcgtgcgcatcgatcccttcggctacgctgtcgtaccacaaagcgttccctatcgggtcaattctgtcgcgctcaaccctcaggacttcgatacctttcttgatgtccctaacgcggtagcggataccgtgcctacccgcggggcaatcacccgggtgcgctttgatacgttccggggatatagcgtgctgatccataccaccctcgccgacggcagctatccaccattgggcgcacagctctatcgcgccagtgggatcagcaatggtctggtcggcccgggaggagaagtttacgtcagcggagtcgattcaggcgaaaagctgcagatgaaatggggcgaaacgcaccagcaaagctgcgaaatcaccctgcccgaactgcgccaggagcctcagcaggcgacggcctggcgtgaattatccttaatctgcacagtaaccccctcgaggtaattatgcgccgacttagcgatacgttatttctgacatggctttccgttctgttcatgctgagcgccttcccggcgcaggcgctgacctgcaagaccacctcgtccacgatcagcgaagtcgtgaatatcgagagcatcattaaagtctccagcagcgagcttattgccaataaaaagatatgggtctccagccctattaccgccaccttcagttgcgaagataccgataattttccgaacggtgaaagcgcctatttctggctggatccggaaaataaagccagcagcttgcccgactttatccaggtaggcattacttacaacggcatcgactatctgctacaaaataaaaaatcggtggagattggcccggcgacgctgtgtgataaaagcgggaatacctgtaagtccccggccattgggcagacattcagcctggtttaccaggtctatatcatctcgacgggccgcagagtgaccggggaaggtaaaatagacgataacctaaaattgtcgctttttcaggtagatggccaaggcggtctacgcaacggcaccgctggcgccaactataatcttttcattaccggcctgaaccgtatcagaacaatggcctgcgtccccacggtatctatttcgccaagcgaaattaactttggcgatattcctgccggtaacgcccgaccgggctactatgaaaaaacacgcccctttaccgtcacctatggtctggtcaagcagggtaacggcagtgattgcgggaccgaacctatgcttgctacgtttagcaccactaatacgatacaggagagcgccattattttgccgcagcccgacagcggcttcggcattgccatctcgccaaacgccagcatgcatccccttattgagatgaatgctccgattcactttacgctggcaacgggcgcgaccctcgcgagcacctatacggcggggctgctctggttgtcgagaacgccgaagctggggcctttttccgcgaccgccaaaatcaccgtgacctttgaataacgccgccccaggctagttatactccagggcgaaagtcaccatgctgttggccgtaccggctcccaccgtggcgtcagtctgcacatactgggcgttgaaattgatcgcctcggcggtaccggcgctggcgccggtcacccttttcaggatcggcaagttgctggcctcattgatcttaacgctggtgccgtcgggcactgccgcaccggggttattgccgtaggtcagcttcacgccgacgccgctggcgctgttgctggcctggctcagggccagggtatcgctctccacgctgacgccgaaaaagccgatgcgcacgtcggtcggcgtcggacagaagaccggaatcgaaaagcgcttcgcctggccgccggtagtccctttgccatgaaactccccccggttaaccgtacccagactgacctggatcgtcgatgtcgctacctggcagctgccgctgctgccaatgtccacattcagggcggcgatatcgatgctgaccggcgcgctggcgacaaagctggcgcttgcgctggtctgctgttcaatggtcatctcccccacctgcggcagcggcggcgagttggtatgcgtcccgtccgccagttgcaccgttccggttttatagaaggttaccgcaatcctcaccgtggtttgctgctgcgtcatcagcgccgggagcgtcgcactgtcgcataccaccaccgactcgccgccggcggagtggctgccatcgatggcacgcatcgggccgccggcgcactggaagctgagggcgtaaccaatgccgtcgatagcgctggggtagacatgctgtccgttaatcaccatcggcgagccgccggttttcagctgcttatagacgatgcgtttggcgctcgccgtcggcagctgcaggtcgcaggaaaaagggatcccgctgccgttatccgccatcgcgctggtcatctgggtattgatcggcagcgtgggtaaatacttgatattaggaatattgaccgtggtctggccgatatttgcgcggcaggtttcagcccgcacgccgggaagataggcgctcagccccagcagaaagaggaaaggaagtagacgaaaaacagatttcatagccgcctcagcgtgtctggcacagtccggagacggttttcaccgtattcagactctgctgtgggttatccggaagatgaaaatgcagcgtgcagctctgcgactggttgttgacgatccaactcaccgccagggttccctcctgcggcacaccgctgagatacacctggccgccgtcggccaccatgccgcccggcggattgccgctctcctcctcctcgaccagccgcgcactggcgccaaacggtagcggcccctgggcattgcgcagggtaaacagcacccggttgccaatgtgggtctggtagttggccatcaccaccgcgccgccgccggggatcacggtctgcccctgctggtcgacgtcggtgtcgtcggccatcgactccgtatcgagggtaatgacatttttccggtaggcggtcagggagggcaccacggcatagccgcgccagtcggtgtgcacattgttgccgttttgcaccgccacgccggcggcccccggcgcccggacgatggcgaagctctcacccaccgtctggccgaaggtgacgccgtgcggatgcgcgaccaccgagccggcgcctccccaggtcaactggttgctggcggcgtcatggcgatagccgatctgggcgttgccgaagccgccgtggtagtccagggaggcgctgctgttgctgcctcgtccctggttgccataaccttgctgaaccgagtagaacagatttggccgcgtcggcaccgcgccatacagcgacatctgctgcgaggtatagccattgctgtccgaggtggtgttgtagctcaccgcgctgtcggacagcggaccacccagcggaatattgatattgaatgaccaggagcggtcatttttttgctggccgctggcgcgggtgtagtaatagcccacgccccaggagatccctttccaggcgctgtagaacccaaggtgcaccgtctcatcccgactctgccgatgccagtactcctgcgaccaggcggaaaccgccagactgcccaggccaccaaggctttgcgacaccgacagctcttcccggcgacgccggttgtctacttgcccctgggcgctttcaagggcgctggcttcggcaaaatcgtaatagccgcttgacgagtagcgatagctggcgaggctgaacgcagtgcccgagctgacaaaatttttctgatactgagcgcgcagcgaatggcccgtatagcgcttgcccgacggcgtacgggtgacggcctgggtgacatcccctcccagcgatccgaactcgccaaaaccgcggcccaggcccagcgcccacgcctgatagtcccgggccagctgcgtaccaccatagagggtgaatcccgccgtcaaaccgtagaacaaagtgccctgcagaaattccggcgagcgcaccgactcccccccggagtggtagcggccgacgctgagactgaatttgccgcgcccttcgcgcagcatatatggcaccgcggaatagggctgggtaaaggtacgcaccgcgccattgctctcggtcaccttcacctccagatcgccgctctgcgaggtggggtagagatcgctgatggcgaacgcccccggcgacacaaaggtctcgtagatcacatacccgtgctgagagacggtcactttggcattgctgtgcgccacgccacgaatggtgggggcaaagccgcgctggctgtccgggagcatttcatcgtcagacatcagctggacgccgcgaaactgtatgctgtcaaacacatcgccggtggtataggtatcgccgatccgcagcaagctcttcagcgagcggacatcgcgctgcagccaggtgctctgggtatcccagtgccggcgctgctggtcatactgcattgaggagatgttgcgcagtcgccaggcgcccaggttgaggccgctgcgtaaattgagatagtttgagcggctgctctccccttcgtcggcgttctttatttgcgcgccggaaaaatagtaatcgacaaacgcggccggcacgccatcgtcccagcgcgacggatcgacatagccgcggctttgcacgttcatcgccgcctggggaatactcagcgtcaggcgctggttagcgaagctgaaccgactgctggcgtcgggaataaacttctcgatccgggtgaaggtttcgccttcatgcagcgcttgaaaggcgggaaacgcgctgacgttgacgccatactccgccagctgaccgggcgtcagcaccgggcgcagctgcccgccatcgtcaacaaacgtgatatcagcctgatccagctcctggtcattaaccaccacggtgacaggataagtccccggctgctggccgccgggtttggcgaagtagtgcagatcggaggtttgctgctgcgggtcagcaaactccagcgccgccgggtcaaaatagtcgtcggccagcgcccggctcaacggactgagacaaaacatcatcgtcggcaccgtcgccagcgccaccgcccgcccggcggtaacgggcaacaaggcatactcccgcaccctggctgttgttattcttttcatgctggcgccgtccggtaagctcatcaaaaaggggaattactgctgggcgaaatcgctgacgccgccgtagtcattaatcgcccgccatttgacggtgccgtgcccgctcaccggccacgttttctcgccgaagggagccaccatgccgggatcgtcgatgctttgcccgcccacttcgacggcgtaaaaagagacgaagtagggagtgggatttatcaccgtcagccgaccgccggactggctaaacttcagctgctgccaggcctttgccgggtcgcccgccaggtcgttggggcgatagaagattttgaatttcgatttaatattcacctgcagcttattcacctcgccctgaggcgtcggggcgatacttttgacgttcagccagaagaccgattcacggtcgcggggcagcgaggcgccaataaagttaatccgcagaacgttattttgctccggatcgagacggaacaagggcggcgttacaatgaagggcaccctggccttatcgttttccgcgtaattttccacccacgactgcaccagatagggcgtatgggtatcggcattggtgactgaaatagcggcttcacgcttcccttcctgataaatcacacgggttccacccatgacaataccggcctgcgctgccgtggtgcacagcagaaaagccgcaacggcaattattttcttcatcatgacttaccatcaggtaaaagttgaacagacaacaaaataaagcagtgaataacagagccagtactcgacgggataattagcaaaaacaactataccgtcacgaatatatttcgtgacttcatgacaattaacacattagctatctgtaattaatcaagacgcagtgggctgactctgaataacgcgcaattagatcaattataaatcatattgaaattagctgtaccgtcggctttacctgccgtcacggtcgccgcggtggagatatagtcggcgtaaaactcgaggtcggcagagccggtgccgccgctggtacccggagtgaccgtctgtttggctgacgttttaccgaggctgacagccgtcgaccgatcgtgctcatacagcttaatcgctacgccgctggcgccgccgttgatggccagcagggagttatcagactgatcgcgcgcgccgtcaaacagcacggcgaccgtagtcacgctggccgggcaatctttcactttgatatggaagggggttttggtggtttcaaaaccagtgccggtaaaatagttgctggcccatttgcccagatcaaccttctggccattagaactactatcgacgttgcaagagctgtcggtgattgacccattgaagatgacctgcccgccggcgccttccgaactggtgcccgagtcaggattgatagtgttggccgcggtagcctgcaaggctacgccagaaagcagcgttcctatgaggatggttataaagcgaggttgttttttcattatttatctcatcgttaacgaacatattttccatcatcgacaatagccccaaagctatcgcgaaacggctcgtcagctcctccctgtaaatgtacgttgcgttccttccgcaggatattaggcacatccccctctactctgccttatttcgccaatagatggccatgaataacaaacagaagaaaaaagagttattttgatgtgcgaaataaatatattacccgaagtatcaaaaggcaacccggggagatgttaactataagttaataactatgttcgccatatatttaatttttgaaatggcttttcaatgttaatttacatatctatacaaaagaaattcaaatacctttaaacaacaacagatcaattcaattaacaaatttaaagacaattgttcaaaaattcgtcttgttttattgtgcgctcgtcagagcgtacacaaaaattaggaattttcctggtattaatattcataatttctacacaaacggcgccagggtgcgccacctccacccgctaatcccttattatggaagtgtttttattttcaagtgaaagccaatacataagtgacataaatacatgggcgctgccgccggcaaaataaccaccctcttcgaatggttattttgaagttaaaaaaaatccgcaacccgaatggattgcggactgaggatcggtcagaaatgagatggacttcagaacaggcccagcggcgcggtgccgtagctcaccagcaggtttttggtttgctgataggcatccagcgccatcttgtgcgtttcccgcccgacgccggactgtttatagccgccgaacgccgcatgcgccgggtagacatgatagcagttggtccacacgcgaccggctttaatgccgcgacccatgcgataggcgaggttggtatcccgcgtccacaccccggcgccgagaccaaactgggtctcattggcgatagccagcgcttccgcttcgtccttaaaggtggtcaccccgatcaccggcccaaagatctcctcctggaaggaacgcatatcgttgcgacctttaatcagcgtgggctgaatataaaagccattatccagcgccggcgcgatagccgcccgctcgcctccggtcagaatttgcccaccctcttcccgggcaatctgaatataggagaggatcttgtcgaactgctggcgggaagcctgagcgccgatcatggtgtcggtatctaacggatcgccgcggcggatctgcgccaccttctccatgacccgtgccataaagggctcatagatggattcatggatcagcgcccgcgacgggcaggtacagacctcaccctggttgaagaagccgagcaccagcccctccaccgccttctcaataaattcctcttctccgtccatcacgtcggcgaagtagatgttgggcgatttcccccccagctcgacggtgcaggggataatattttccgccgcgcaggcgagaatatgccgcccgaccggcgtggagccggtaaacgccagcttggcgatacgcttgctggtggccagcgcctcgcccgcctctttgccgaaaccctgcaccacgttaagcaccccggccgggaacagatcgccgatcagctccagcagcagggtaatgcttagcggcgtctgttccgccggcttgagcaccacgcagttccccgccgccagggccggggccagcttccacgcggccatcagcagcgggaagttccacgggataatctgcccgaccacccccagcggttcatggaaatgataggccaccgtggtttcgtcaatctcggcggtgcttccctcctgagcgcgcaggcagccggcgaagtagcgaaaatgatccaccgccagcggcaggtcagcattcagggtttcgcggatcggtttcccattgtcccagctctccgccaccgccagatattccagatgctgttcaatacgatcggcgacctgcagcagcagcctggagcgctgttgcactgaggttttaccccacgccggcgccgcgcgatgggcagcgtcgagggcgaagtcaatgtctctggcatccgagcggggaaactgcgcaatgttgcagccgtcgaccggcgaagtattcataaagaattcaccgctcagcggctcgacaaatctaccgtcaataaagttgccgtaagccgatttaaatgaaaccacggcgccgggctggccaggatgtgcataacgcatcgcaaatctccttctgtagggttgagacgcagcggcatattgattttttaagtttgccgccgaacgcttctcactttgcaggggttatgccagttttttattttctttaaatatttttatttattaatacgttgccttcactaaccgagcagatggtcagccactgtcgcacgggtttccacttatgtgttgcaaatcgcaacaccaaataaaccaaatagctacaatattgcaacacagcaacatcgacccagaggtgccctgtggcaggcaatccctttcttctcgcaccagaggttaatgcgaatcccctgctgagcgattcgtggtctcgctgccagcgctacgggctggatcccgccaccgaggattttccccgcctcggtgccggcgagctggcggaccggctcgccagccaccgaggcctgcagcagctggcgcagccggtggtggaagccctgtcgcgccaggtcgcagacctgcagtcggtggtgatcctttccgaccccgacggcctggtgctgcatactctcggcgatacccaggcgctgcaaaaggcccagcgcgtggcgctggctcccggcaatctgtggagtgaaagcgggcgcgggaccaacgccatcggcaccgcgctggcgattgacgatggctgcgagatcgatggccgtcagcactttcttacccgcaaccagaatctgtactgcgcggcgatgccgctccagcgaccggacggaagcatcgccggggtgctggatatctccggcccggcgaattttccccaccagcacacctttggctgggtaaaagcggcggcaaagcaaattgaatatctgtgggtgaaacagagtctgcatcctgagcagtggctgatgagcctgcaccggcaggtggacaaactcgacagcgtcgaggagctgctgctggtcttttccgacaacgtcctcaccgccggcaaccggctggcgatgcgcgagttcggcctgagcgcggcgcagtttggccagctcacctttgcctcgctttttccgacgctgacgcaaacggcggtcagcgtcccgctgccgctgaccacgccgcagggccgctaccactatcgcctgcgggagcccacccgccgccgggtggcggtaagcgccccgccggccatgcatctcccctttaccagtccgcgcgaaggcgaaaagctgctgcggctgctcaacgccggcatcgccctgtgcattgaaggagaaaccggcagcggcaaagagtatgtcagccgcacgttgcaccggcacagccgctggcgcagcggtaaatttgtcgccattaactgcgccgccattccggaatcgctgatcgaatccgagctcttcggctaccagccgggggcgtttaccggcgccagcaaaaatggctatatcggtaaaatccgcgaggctgacggcggggtgctgtttcttgatgagatcggcgatatgccgctggcgctgcagacccgcctcctgcgcgtcctgcaggagaaagaggtcgctccgctgggcgccagccgcagcgtgccggtgaatttcgccttgatctgcgccacccaccgcaacctgacccagcgggtcagcgccggagaattccgtgaagatctgctgtggcgcctccgggaatacgccctggcgctgcctccgctgcgcgagtggccggcgctggaaacctttatcgccaccctgtggcacgacctgggcggtgcttcacgccgggtgacgctttcaaacgcgctgctggttcacctcagccagctgccgtggccgggaaacgtacgccagctgcagagcgtcctgaaggtaatgctggctctcgccgatgagggcgacacgctgacgcccgacgcgctgccggaggcgtatcgcgccgcgcctgcgccgttgccgcgcgggggattgcaggcccatgatgagcagttgattgtcgataccctggccagggtcaacggcaacgtcagccgggcggcgcagatactgggtatcgcccgcagcacgttgtaccgccgtgccgcccgtgccggacggcctcgtcgctgaggctatggcgtaaagcgcgccggtagcttgcacgctgtcggaaaacctccgccgccatagatggcggttatttctctctgcgctaaccaggtgttgcggtaagaggtagcccttcccgcagggcatcgatcgccgcccgcgttttttgcggcagccacggcccctccggccataccgcgtggatggcgaaacgcacctgagcgctgggcgccaacacctgctgcaatgtcccatcggcaagcgcctgcgccaccagccagtccggcagccaggcgatgcccatcccctgctgcactgccgccgcgatggcggcaaaatcatcctgtatcagccacgtctgcggactgaagcgcacttcgccctgctgcgggtcatacagttgccatttttgcagctggccgttgtgcagatagccgagggtacggtgctcgttcaacccggcaatagtctgcggcgctggctgctggcgcaggtactccgccgccgcgcacagcaccatgccgtgctctcccagcgcccgggcccgcagcgacccggtatcggccaggctcccgatacgcaccgcaagatcaaacccctcctccagcagattgacctgccggtcgctgtagtggagctcgagcttcagtaacggatagcgctggctgaggcggaacagcagcggtgccacgcagcgctggccaaacagcaccggcagcgacacccgcagccgcccctgcacctcatctttgccgcgctgcagcgtctcttcggcctcgcggatgcgctccagcgcttcccggcactggagatagaattgctccccctcttccgtcagcagttgccgtcgggtggtacgctggaataacgccacgccgagacgcgcttccagccgggcaatggtttttcccaccgccgaacgcgtcacatggaggatcgccgccgcgctggcaaagttgccgctctcgaccacggtgacaaataccgggatcgcattcagatcgtcgcgcacagattggttccttacgggatacaatagggaaaaataatgtcactcctgagacaaaaaagacagtgttagtctttgcttctatctttcatttgaggcactcatcatggctaacgttctggttttaaaatccagcattaatggcgaaacatccctgacaaatcagttgattaacgaatttctcgcggcgcgccaggcggcgggacacggcgatcggctcaccgaacacgatctcagcgccatggcgctgccaacgctggatcgccccctgttcgccgccctgcgcggggcagtggatccgcagcctgctatccgcgaggcggtcgccctctccgaccagcttatcgccgagttaaaggccagcgacctgctggtgatcggcgcgccgatgtataacctcaacgtcccgaccgatctaaaaaaatggttcgacctcgtggcgcgggcgcgggaaacctttcgctacaccgagagctggccgcaggggctggtggagggcgtccgggcggtggtcgtcagcagccgcggcggtattcaccagggagaaactaccgacgccgtcacgccctatctgcgcgcggtactggggctgatggggatccaggaggtggaatttatctatgccgaagggctggacaatcgcccgcatggtcgcgacgccgggatcgccagcgcccgggcgcagattgcccggctcgccgttcaggcctgagtcgtggagaaattgtgctggcgctggcggcctttttattttagagttatctaaatttagacaaagctaaaataaatgaccacacctgaagacctgcaggcccgcgccggagaagccgccgcgctgatgaaagcgatgagcaatcctcaccgattgctgatcctgtgcatgctgtgcgatgcgcccagggccagcgccggcgaactcgcccgggctacagggctgagcccctccgccacctcgcaacacctcgcgcggatgcgtgacgaggggctgatcgacagcgagcgcgacgcccagcgtatccactatttcattactcaccctgcggtacagcaggtgatcaatacgctgaaaacgctctattgcccgtgaggatcctatgaccatcgccaccttaactcccgccgaggcccaggcgcagattgcccagggcgccagactgattgatatccgcgatgcggatgaatatgcgcgcgaacatatccccgatgccgagctggtgccgctcgccactctgaccagcggtgcgcccctcaatgcccgggccggagagacggtcatctttcactgccaggcgggttcccggacgcagaataatgcgattcgtctggccgcggccgccgcgccggcgcagacctgcctgctggcaggaggaattcaggcgtggaaagccgcggggttgccggtagtggaagattcatcgcagccgctgccgctgatgcgccaggtgcaaattgccgctggcgtcctgattttactgggggtgctgctgggctataccgttaacggcggctttttcctgctcagcggcgcggtcggcgccgggctcaccttcgccggcgtaaccggcttttgcggcatggcgcgtctgctggcgaccatgccgtggaaccggcgccagggggttaaaacgcgctccagataagccaggcaatgccgccgaagagcagccatttgacgatgtaatagaccgtcttattccattttttcaaccgtttaccaacaatacggatctggtaaatatagcgaaacgcccggttaatcccgccggtgcgatcgccgatatcgttgggcgccgaagcggcgctcatcagatgacgtcccagccagtggttaactttctgcgcccagcggtagcgcatcggccgttcaatatcgcagaacagaatcaggcgattctcaccactggtattttccgcatagtggatataggtctcatcaaacagcacgccttctccatcgcgccagctgtaacgctggccatccacctcaataaagcagcggtcatcgttcggcgttgccaggcccagatgaaagcgtagcgagccggcgtaggggtcgcgatggcgcggcagacggctaccgtccggcagagtggcaaacatggccgctttcaccgacgggatatcgcgcagcagcgcggtagtttgcggacagagctggctggcggaaggatgggcatcctcataccatttcagataaaagcgtttccagccggttttgaaaaatgagttaaacccggcatcgttatatttatcggccgctttaatctgctccagctgctgaaggtggagaccttcgtcgcgaataacctgccagttttgctgcaatatcgccagctcgggaaacatctccggccgcagataaggcgtattcggcacgcgggaaaataaatacataaatccattcagcggcgcggtaaatgtggaatggtcggagagctgccgccagaaacgatagcgcacccgtccgcggtaatggacatacagtacagcaataacaatgatcaacagaatgatatacttcatggtgtctttcctgacctgattggtggtaaccctaccctcgccgtccccctttctcagcagcggtatggcgccagcaaaacattaacaatgttaatacatataactccaaattgttttaacaaaaaacagcacgcccggtgttcagtgagcgggcgttgagctatggtttaggtttatccatggtgttaacagtgaggagtgaattatgtttgctgtcggcgatctggtacaaccccgagcgggcggaccaaaactgaaagtggtggaagtgcaaggggagcaactggtggtggttcaggccgcacaggagcagggagagcgctattcgctgaagtcggacgaggtcacgccgtatcaggaagagggagacttcggcgtctgctaaagcccctcgcttaaagtcataaggccaggccggtgggtctctcaccaccggcctggcgctggcccgaaggcgttaaattaaaaagctatccagcgatttaccctgggcgacagcctcggcaatcggcttcggcattcttccctgtccggtccaggttttctctgcgccagtatgatcggtataacgatatttcgccgggcgcggttgacgctttttgcctcccgcctttggcggctgaatatcggccaccagctcgtcaggagaaataccgtcggcgcgcatcagttcaagccaggtattcactttctcctgatattcagcctgctgctgagctgcctgctgctgttgcgtacgtttttcttcagtgacgatcctgagcttttccagcatctcttcaagcacgtcaatggagaattcacgggacagggcacgcagtgaacggatattattcagtttgtgtaacattgaagacataaaattaaaaaattccaaatagcaaattaaaagatacaacgcggcaagtgtaatagaaacgtttatttatttccagccttcggttgtccagataaatatataaggtggatattagcggttatcccctggaactatattggcaaatacctgagcctttttcataagcacaggcaaaaaagagagtgaataaataaaaaaggcagaatgacgggaaaaaccaccgttctcgccaggaatattagctttatggtcagcgggttacctgctgttcatacgtggccgcactgatacatacctttggccacagtgaatagttaatcagaaaatgggaataaaacaacaattcgcaattcagaatttttcaccataaaaaagcgacttacggcataaaaaatcctaaaagagagcggaatcacacactcgcgtgatgttgcgccatggttggctatcaggcgccgttccctcggccagtctcgatttcgcaatcaagagtaacacattgataaatattgatatttgcaaaaacaggaataaaagtagcgtaacgaacaaaaaacaaaccagcgcagagtattttatcgacaaaaaggcgataaataaaaatttatagctagttgccacttttaatgcagagatatactctacgcacatcaaaacaggcagcccaaaaacgctataccaacgcgcatttttcggcgttaatgacttcattttcgaggagcactccgatgttctctgcgcactcccgcttgcggcatgcggttgcagacacctttgcgatggtggtttactgcaccgtcgtcaacatgatgatcgaaatttttctctctggtatgacgtttgagcagtcgttatcgtcgcgtctggtggcgatcccggtcaacattattattgccgtaccctatgggatttatcgcgatttcgccatgcgtcaggcccggcgcatcagcccagccaggtggatgaaaaatatggccgacgtgctggcctacgtcacctttcagtcgccggtgtatgtcgctattctgtggagcgtgggtgctgactggcaccagattgtcgccgcggtgagctcgaacctggcggtatcgatgatgatgggcgccgcctacggctacttcctcgactattgccgccgcctgttccgcgtagcgccctatcagcaggcgaaggcctgaccaacgcgttagcagcgactggctctgccagtcgcctcttcccgccagcccgcctcgcctggatccttaaatgcctatcgccgtattaattcgtcgacattgccggctgggcttcgccaaatagcccattcagaaaacgctcaagcgccatgcgtgagctaaatccatgcggaataccataatgttgttgcgcatccccggctaaatacagcggaaactgttcataatgatcacaggttttgatatctgaagccggttcggccagcatattgctgcgctcttttaacgccggatgaataactaacgctgttcgccccatgcgcgcttcgcggttcacataaacataattatcgccgcggcgatagccgtacgctttttgcgtcacaacatccatggtgaagccggctttttcaagaacacgcgccacctcatcgggtcttaaatacatactgattcctcgttatcttttaccgcacattgaccttaccttattcattaaggacagtgctttcggaaaattccagaaaccacaacagtaagcataattcaaaatcttgtcctacacttactcactcgatggaattaagggagataacgatggctaaccatgtgaaccgcaacaattttgacgagaacgccgaagatattcataacgatgtcagccaattagcggatacgctggaagaggtgctgaaatcatggggcagtgacgccaaagaggaagcggaagcggcgcgtgtcaaagcgcagtcgctgttaaaagagactcgtgcccgccttaatggccacaaccgggtgcagcaggcggcgctggatgcgcgccaggcagcgtgcgatgcgctgggctgtgccgatacctacgtgcgcaataaaccgtggcacagtgtgggcgccgccgccgccgtcggggtatttattggcgtattgctcaatttacgtcgataatagcttaagcgtcggctgccgccgcgcgattggcgcgcggtagcccgcgagctttacggaaggcaatgaagataacaaatacgcgtcagcccctgcgcgcctctggccgcaggggtttttctgcttccccgacttaagcgccatcaaatcgcaatcgcctctctcagccgtcgggcaagtccgtcagccatcgccggcgaacgtatattggtaaaactcatcaataatcccccctcgcccgcgtggcgaatccgccagtcgctcagcgcctgcaccgccagcccggccacaaccgcccgccgcgcgagcagccgatcgtcgccgctgaccgacataaccagttgtattccccccagctgcggtgtgacctgaaagccctgcgcctgcagagccgactccagccactgtctacgctggctatagctggcgcgcattttcttcaaatgacgccaaaaatgtccctgctggataaaatccgccagcgtctgctgccacagggtgggaacggtgcaggattggcgctccgcggtctggtgaaaacgcgccaccagcggggtcggcaccaccagccaggcggtgcgcagcgccgggaacatcgacttactgaaggtgcccgcgtagatgaccctctgcggcgcatcaaggcttttcagcggcggcagcggtttgccgtgatagcgaaactcgctatcgtaatcgtcctcaatgatccacgcgtcgcgctccgcggcccacgccagcagctggcggcgtcggggaagcgacagcgcgacccccagcggactctgatgggctggtgtgagcagggcaaatcgcgcctgcgggtgatgacgctggccccagccgacgtccatcccttcgtcgtccacgggaatcgcatccaccgccagctgcccagcctcgacgaccggccggataaagggataccccggatcttccatccacatatgctgtcccggctgcgccagggtacgcaggataaggttcatggaggcggcatagctgccggtgatcaacacctgatccggctgacagtcgatactacgcgacaggcgtagataatcgacgatagcctggcgcagaagcggatcgccgccgggatcgccgggtgcaagatcgaaccgcgactgcgtccgcagccgacgccccatcacccgcgcccactgcccgcgcggaaagagatccagcgccggcagccccatctgaaacggcagcggctccgtcggcgcggccggttgcactggcggtaccggcgccagctggcgcgggctgagccgctcgctgacaaaggtccccgcctgcccacgccgctcgagccatccctgggcgaccagctctccccaggcgttttcgatggtcgcccgggagacgccctgctcctgagcgtacacccggctggcgggcaaacggctgcccggggtcagttcgccacgttcaatcgccgatttcaactggcgggcgatacgctgataaagcgggaggttaattgcttccattatggtctgcttttttcatcagaatatggctatcttttgcagtccattatagtgctattttggctgccgtcttagagaggagaacaccatgaaccaattacgtcagccattcagtgaactgagcccggaagtctataaagggctggtacaggccagcatcgcgctggagaaaagcgagctgggcaacgccctggtagagctggtttatttacgcgtctcgcagatcaacggctgcgccttctgtcttgagaaacatagccaggcgctgcgcaaaggcggcatggcgcaaagcaaactggatgcccttgcgggctggcgggtaagcgcccactttactccggccgaacgcgcggcgctggcttgggccgagtcggtcaccgacattgccgccagccatgcggaagatgaggtttaccagccgctgcgcgaacattttaccccgcgtcagataagcgatctgaccttcgccgtcagtctgatgaacgcctttaaccgcctcgccgtggccatgcgcctgtagttccgcacagcctcccccctcctccgccgatctatcccggcgggggactcgcttgccaaaaacgctatatattgagtggttgaagttttaaataactacatctagtatttccttatcgaatggcccactacgttcgacgctatgtttagcgccgtgctgttatcttaaaaggaaatacgaatcatgcgcattattatttacactcgaaatgactgcgtgcagtgccatgccacccggcgagccatggagagccggggactggcctttgaaatggtcaacgtcgaccagcagccggatgccgccgacaccctgcgcgagcagggatttcgccagctgccggtggtgatcgccggtgagctgcgctggagcggcttccgcccggatatgatcaatcgcctgcgcccctcctttacggcggccagcgcatgagcctcatcgtctacttctccagccgttcggagaatacccatcgctttgtgcagcgcctggggctgccggcggtgcgcatcccgctgaacgagcgtgaacatctgcgggtagacgagccctatattctcatcgttcccagctatggcggcggcggcaccgccggcgcggtaccgcgtcaggcgatccgctttttaaacgacgtgcataaccgccagctgatccgcggagtgattgccgccggcaatcgcaactttggcgacggctgggggcgtgccggagatgtcatcgcgcaaaaatgcgccgtgccctatctctaccgcttcgagctgatgggaacccccgacgatatcaacaccgtgcgtaaaggagtcagcgaattttggcaacgacaaccgcagaacgtataaccgccgccgtggattttcacgccctcaacgcgatgctgaatttgtacgacagcgagggccgcatcccgtttgaaaaagatcgccaggcggttgaggcctttatggcgacccaggttcagcccaacgccctcaccttccccagccaggaggataagctcagctggctcgtcagcgagggctattacgatccgcaggtgctggccggctatgaccgcgggtttgtgctggcgttgttcgcccatgcccggcgcgctccgtttcgctttcagaccttcctcggcgcctggaagttctataccagctatgcgctgaagacctttgacggcaagcactacctcgaggatttcgccgaacgcagcgtgatggtggccctgacgctggcccggggcgatgaacagcaggcgcggcagctgacggaggagatactcagcggccgctttcagcccgccacaccgaccttccttaacgctggcaaacagcagcgcggggagctgatctcctgcttcctgctgcgtattgaggataatatggagtccatcggccgggcggtgaactcggcgctacagctgtcgaagcgcggcggcggggtggcctttttactctccaacctgcgcgaggccggggcgccgatcaagcgcatcgaaaaccagtcttctggggtggtgccggtgatgaagatgctggaggacgccttctcctatgccaatcagctcggcgcccgccagggggcgggtgcggtctggctgcatgttcaccatcccgatattttacgctttcttgatacccggcgtgaaaatgccgatgagaaaatccgcatcaaaaccttgtcgctgggggtggtgatccctgatatcaccttccagctggcgaaagaagatgcgcagatggccctgttctcgccttatgacgtcgaacggctgtacggcaaacctttcgccgattgcgccatcggcgacctctatccgcagctggtggccgacgagcgggtccgcaaacgctggatccgcgcccgcgacctgttccagcgcctggcggagatccagtttgaatccggctacccgtacatcatgtttgaagacaccgtgaaccgcgccagtccggtggccgggcgggtcaccatgagcaatctgtgttcggagatcctgcaggtcagtacgccgtccgcctataatgaagacctcagctatgcgcatatcggggaagatatctcctgcaacctcggctcgctgaacatcgcccataccatggactcgccggatttcggccgcacaatcgccaccgcggtgcgcgccctgaccgccgtgtccgacatgagcgacattcagtcggttccctcggtggcggccggcaacgcggcctcccacgccatcggcctggggcagatgaatctgcacggttacctggcgcgggaaggcattgcctacggcagcccggaggggctggacttcaccaatatctacttctacaccgtgacctggcacgcgctgcacacctcgatgcagctggcccgcgagcgcggccagcgcttcgccggcttcgagcagtcgcgctacgccagcggggcgtacttcgacaaatatctgcaggaggagtggcagccgaaaaccgaacgggtgcgcacgctgttcgcccgcgccggcatctctctgcccgaccgggaaagctggcgccagctgcgcgacgatgtcatgcgctatggcatctacaatcgctatctgcaggcggtgccgcccaccggctcgatctcgtacatcaaccatgccacctccagcattcacccgatcgtctcgaagattgagatccgcaaagaggggaaaaccgggcgggtgtactaccccgcgccatttatgaataacgacaatctggccctctaccaggatgcgtatgagatagggccggagaagatcattgacacttacgccgaggcgacgcgccacgtcgaccaggggctgtcgctgaccctgttcttccccgataccgccaccacccgcgatatcaacaaggcgcaaatttacgcctggaagaaaggcatcaagacgctctactacatccgtctgcgccagctggcgctggaaggcactgaaattgaaggctgcgtgtcctgcgcgctgtaaggagaacaggatgacccatttaacgcgcgtcagcgcaatcaactggaaccgcattgatgacgataaagatcttgaggtctggaaccgtctcaccagcaacttctggctgccggagaaagtgccgctgtcgaacgacattcccgcctggcaaaccctcagcgcggcggagcagcagttgaccattcgcgtctttaccggattgaccctgcttgacaccattcagaacaccgtcggcgccccggcgctaatggcggacgccttaaccccgcatgaggaggcggtgctgtcgaacatcagctttatggaggcggttcatgcccgctcttacagctccatcttttccacgctgtgccacagcaaggaggtggatgccgccttcgcctggagcgaaagctgcgatcccctgcagcgcaaggcgcagctgatgctgggttactatcaggccgacgagccgctgaagaaaaaaatcgccagcgtgttcctcgaatcctttctcttctactccggcttctggctgccgatgtacttctccagccggggaaagctgaccaacactgcggatctgatccgcctgatcattcgcgatgaagcggtgcatggctattacatcggctacaagtaccagaaaggactggagatcgtcagccccggcaagcgcgaagaattgaaaaatttcgccctcgatctgctgatggatctttacgacaacgaactggcctacagccgggagctgtacggcgagagcggctggttcgacgacgtcagcgctttcctgtgctacaacgccaacaaagcgctgatgaacctcggctacgaggcgctgttcccggcggagatggcggcggtcaatccggcaatcctcgcagcgctgtcgcccaacgccgacgaaaaccatgactttttctccggttccggctcctcctacgtgataggaaaaatggaagagaccgccgacgacgattgggacttttaaccgtactttcaccaggaatatcgcaggcggattcctggtgattaatttcacaaaatagcgtttaatccaccaaatattctctccatgacctaaccgtcatcacttcgtcatatttagcagaaaaccggtccatttcagtcgaattatccaaagataatcaaaaaatattaccaacaacaaattaccgcccagcccttatatcacgggggcttagccacagttgtccccatctgattttgccgagagtttgccattgagggttgtcacagaatctgagtatgttagggtgtaaaaagatcataatcaccatcgggtatcatatcgcaataaacaaataacaggaacttctctattgcatggcaattaaattagaaatcaaaaatctttataagatatttggcgagcatccacaccgtgctttcaaatatattgagaaaggactcaacaaagcgcaaatactggaaaaaacggggctgtcgcttggcgtcaaagacgccagtctggccattgaagaaggcgagatattcgtcatcatggggctctccggctcggggaaatccaccatggttcgccttctcaatcgcctgattgaacccacccgcggccaggtgctgattgacggggtcgatatcgccaaaatgtcggatgccgagctgcgcgaggtgcgtcgcaagaaaattgcgatggtttttcagtcctttgcgctgatgccgcacatgagcgtgctcgacaacacggcgtttggcatggcgcttgccggcgttcccgccgccgaacgagagcaaaaagcccgggaggcgctgcgtcaggtggggctggagaattatgcccacgcctggccggatgaactctccggcggcatgcgccagcgcgtcggtttagctcgcgccctggcgattaatcccgatattctgttaatggatgaagccttctctgcgctcgatccgctcattcgtaccgaaatgcaggatgagctcatcaaattacaggcgaagcatcaacgcactatcgtctttatttcccatgaccttgatgaagccatgcgaattggcgatcgtatcgccattatgcaaaatggcgaagtggtccaggtcggcactccggatgaaatattaaataatccggccaatgattatgtgcgcaccttcttccgcggcgtggatattagccaggtattcagcgcgaaagatattgcccgccgcagcccggttggcctgattcgtaaaacgcctggttttggcccccgttcggcgctgaaattattacaggatgaagaccgggaatatggctatgtcatagagcgcggtaatcgctttgtcgggattgtctcgattgattctctgaaaacagccctcagcgccgggcaggggatcgaggcggcgctgattgacgccccgctggcggtggaagcgcaaaccccgctcagcgatctgctctcccacgtcggccacgctccgtgcgccgtgccggtagtggatgaagaacaacaatatattggcatcatttccaaacggatgttgctccaggctttagatcgcgagggggtgaatcatggctgatcagaccaatccatggggcagcgccccgtcaaccgacagcgccgcgcaggctgccgacgcctggggtggtgcctctactgccgcgccggctaatggcggcggcgccgactggctgcacagcgccccggcgccgcagccggaacagttcaatatcatggatccgttccataagaccctgatcccgctcgacagctgggtgacccacgccatcgactggatcgtgctgcacttccgtccgctgttccaggggatccgcgtgccgatcgactacatcctcagcgccttccagcagctgctgttggggataccggcgccggtggcgattatcgtcttcgcgctaatcgcctggcagatctccagcctcggcatgggggtcgccactctggtatcgctgattgccatcggcgccatcggcgcgtggtcgcaagccatggtcactctggcgctggtcctcaccgccctgctgttctgcatggttatcggcttgccgctggggatctggctagcgcgcagcccgcgggcggcgaaaatcatccgcccgctgttggatgccatgcagaccacgccggcgttcgtctatctggtgccgatcgtgatgctgttcggcatcggcaacgtaccgggcgtggtggtgacgattatcttcgccctgccgccgatcgtccgtctgaccatcctcgggataaaccaggtgcctgcggatctgatcgaagcgtcgcgctcatttggcgccagcccgcgccagctgctgtttaaggtgcagctgccgctggccatgcccaccattatggccggggttaaccagaccctgatgctggccctgtcgatggtagtgatcgcctcgatgatcgccgtcggcggcctcggccagatggtgctgcgcggtatcggtcgcctggatatgggcctggcgaccgtcggcggggtggggatcgtgatcctggcgattattcttgaccgcctcacccaggccgtcggtcgcgacgcccgcagtcgcggcaaccgccgctggtacaccaccggcccgctggggcttatcactcgccctttctgtcgataagtcgataacagcgccgctccccgacaccagccgatgcccgggagcggcccttcccgttaaacaataagaggaaccaccatgcgacatagtacgatgttggccaccgccgcctttgccaccctgctcgccaccagcgccttcgccgccgacctgccgggtaaagggattacggtgaagcccgctcagagcactatctccgaagagagcttccagaccctgctggtcagtcgcgcgctggagaagctgggctacaccgtcgagaaacccagcgaagtggactataacgttgcctatacgtcgattgccgccggagataccacctttatcgccaccaactggcaaccgctgcacgatgacatgtacgccgcggcgggcggtgataacaaattctatcgcaaaggagtgtacgtctcaggcgctgcccagggctatttgatcgacaaaaaaaccgctgagcagtaccacatcacctccatcgatcagctcaaagatccgcagatcgccaaactgtttgataccaacaatgacggtaaagcggatctcaccggctgtaccccaggatggggctgcgaagcagtgattaaccatcagattgacgcctatggcctgagcaaaaccgtcacccataaccagggcaactacgcggcgatgatggccgacaccattgcccggtataaagaaggtaaaccggtgctctactatacctggacgccgtactgggttagcgacgtgctgaagcctggcaaggacgtcgtctggctgcaggtgccgttctcctccctgccgggcgagcagaaaaacatcgacaccaaactggccaacggcgccaactatggcttcccggtgaacaccatgcacatcgtcgctaacaaagcctgggcggagaaaaatccggccgccgccactctgtttagcgtcatgaagctgccgatcgccgacatcaacgccgagaatgcgatgatgcacgaaggccatgcttccgaagccgacattaacggccacgttgatggctggatcaaagcccaccagccgctgttcgacagctgggtgaaaaccgccctcgccgcgcagcagtaaacccgctcacggataaggcccagcgccttatccggcccccttgcccctttctcctggccaggtcatagaaaagcgattccaggaatttccatagtgttaaggcgcatcgcgctctgttaaggtggagacatcggtcaaattgccaccttcacatggatccagcgataagttattcatatggaaaaccccgcgcccttaacctgtgccttacctgaacgcgtcgccaccgtcggcgaaggcgtcaaagacagtctccccatcgtcatcagctaccttccggtggcattcgccttcggactcaatgccacccggctgggcttcaccccgctggaaagcctgttcttctcctgcattatttacgccggcgccagccagtttgtgatcaccgccatgttggccgccggcagttcgctgtgggtcgccgccctgacggtgatggcgatggatgtccgccacgtgctgtatggcccctcattgcgcagccgcattcgctcagcgctggataaaaagaaaaccgccctctgggccttcggcctgaccgatgaggttttcgccgccgctaccgccaggctggttcgcgataaccgccgctggagcgaaaactggatgcttggtctcgcttttacctcgtgggcatcgtgggtgtgcggcacgctggccggcgcctggtccggcaacggcctgctggtggattatccagcggtggaagccgccctcggctttatgctgccggcgctgtttatgagcttcctgctggcctctttccagcgtcagcagtcactctgcgtcacggcggcgctggcgggcgcgctgggcggcattctgttattttccattccggcggcgatcctcgccggaattgtctgcgggtgtctgacggcgctgcttcaggccatgctcaaggggatgccggatgaacagtgaagtccttctgctcggggtgatagtcggcggcgtcaactatctctttcgctatcttcctctgcgtttgcgcgtcggccacgcccgtcctgcccgccgcggcccggtcagcgtgctgctggataccattggcatcgcctcgatttgcgcgctgttggtggtctccagcgtgccggagatcctcgccgatgcccatcgcctggcgccgacgctgaccggcttcctggtgctgggggccgccttctggaaaacccgcagcatcattgtcccgaccctgctgtcggcgtttgcctatggtctggcatggaaaatcaccaacgggctctaagctttacgtatcaattttggtcaataattcatttgatttatttgtcacaatagttattatatcggctgtaattaatgaggtcatacccaaatggatagttcgtttactcccattgagcaaatgctcaagttccgcgccagccgccatgaagatttcccgtttcaggagatcctgttaactcgtctttgcatgcatatgcaaggtaagctgctggaaaatcgcaataaaatgctcaaagcgcagggaattaacgagacattatttatggcgctgattacgctggagtcacaggaaaaccacagcatccagccgtccgagctgagctgtgcgctgggctcgtcacgtaccaacgccacccgtatcgctgatgaactggaaaaacgcggctggattgagcgccgcgagagcgataacgatcgtcgctgtttgcatctgcaactgaccgaaaagggccatcagtttttgcgtgaagtcctgccgccgcagcataactgcctgcatcagctgtggtcttcacttagcaccagcgaaaaagatcagctcgaacacatcacccgcaaactcctgagccgccttgatcagatggaagaagaaggcgtgctagcggactctctacgctaagggcggcgtcgctcagcccatttttacgttgcaaggaaaacagccaggccagcagatctctgctggcctttctgataaacaggtcggctcagccgatgtgaaataataagatcgtggagaataacatgagtgcaaatgcggagagccaaaccccgcagcaaccaggcagcaaaaaaggaaagcgtaaaggcgcccttctgttgctgacattgctcttcattattattgccgtggcatatgggatttactggtttctggtactgcgtcactacgaagagaccgacgatgcctacgtggcagggaatcaggtacaaattatggctcaggtcgcgggcagcgtgaccaaagtctgggctgacaacacggactacgtgcagaaaggcgatccgctggtcactctcgatcggaccgatgcccaacaggcgtttgaaaaggctaagacccaactggccgccagcgtccgtcagacccgccagcagatgatcaacagcaagcagctgcaggcaaatatcgacgtcaaaaaaaccgccctcgcccaggcgcaggctgacctgaaccgccgcatcccgctgggcgccgcgaacctcattggccgcgaagagctgcagcacgcccgcgataccgtcgccagcgcacaggccgaactcgacgtggcaatccagcagtacaacgccaaccaggcgatcgtgctgggcaccaggctggaacagcagccggcggtgctccaggcggccactgaagtgcgtaacgcctggctggccctgcagcgtacgcagatcgtcagcccgattagcggctacgtttcccgtcgctcggtacagcctggcgcgcagatcggcaccaccacgccgctgatggcggtggtcccggcgaccaacctgtggatcgatgctaactttaaagagactcagctggcgcatatgcgtatcggccagccggccaccgtgatcagcgatatctatggcgatgacgtgaaatacaccggtaaagtggtcggtctggatatgggcaccggcagcgccttctctctgctgccggcgcagaatgctaccggcaactggatcaaagtggtacagcgtctgccggttcgtatcgagctggatgaaaaacaactagcggaacacccgctgcgcatcggcctctcgacgctggtggaagtcaacaccaccgatcgcgatggtgaaatgctggccagccaggtgcggagctccccggtttacgagagcaatgcccgtgaaatcgctctcgatccggttaataagctgatagacgagatcattcaggccaacgccggataattcggggtgagtgtaatgcaacagcaaaaaccgctggaaggcgcgcagctggtcattatgaccattgcgctgtcgctcgcgacgttcatgcaggtgctggattccactatcgccaacgtggcgatcccgaccattgccggcaaccttggctcgtcgctgagccaggggacctgggtcatcacctcgttcggggtcgctaacgccatctccatcccgatcaccggctggctggccaagcgcgtcggcgaggtgaagctgttcctgtggtcaaccaccgctttcgccattgcctcctgggcctgcggcgtctccaacagcctgacgatgctgattttcttccgcgtcattcaggggatcgtcgccggaccgctgatcccgctgtcgcaaagtctgctgctcagcaactatcccccggcgaagcgctctatcgctctggcgctgtggtcaatgacggtgattgtcgcgcccatctgcggtccgatcctcggcggctatatcagcgataactatcactggggctggatcttctttatcaacgtgcccattggcgtggcggtggtgctgatgaccctgcagaccctgcgcaaccgggaaaccaaaaccgaacagcggcggatcgacggtgtcggtctggcgctgctgatcatcggtatcggtagcctgcaggtgatgctggaccggggtaaagagctggactggttctcctccaatgagattatcattctgaccatcgtggcggtggtggcgataagcttcctgatcgtctgggagctaaccgacgataacccgattgtcgatctgtcgctatttaagtcgcgcaacttcaccatcggctgcctctgtatcagtctggcctatatgctctacttcggcgccatcgtactgctgccgcagctgttgcaggaggtctacggctacaccgcgacctgggccggcctggcgtcggcgccggtgggggtgatcccggtcattctgtcgccgattatcggccgcttcgcgcataagctcgacatgcggcggctggtcaccttcagctttattatgtacgcggtctgcttctactggcgcgcctggaccttcgaaccggggatggactttggcgcctcggcgtggccacagtttatccagggcttcgcggtggcctgcttcttcatgccgttgaccaccatcaccctctccggcctgccgccggagcggctggcggcggcgtcgagcctgtcgaacttcacccgtacccttgccggctccatcgggacctcgatcaccaccaccctgtggaccaaccgcgaggcgctgcatcatgcacagctcaccgaatcggtgaccccctttaaccccaacgcgcagcagatatacgatcagctgcagggcatgggaatgacgcagcagcaggcgtccggctggatagcgcagcagataaccaaccaggggctgattatctccgccaacgaaatcttctggatttctgcggctattttcatcctgctgttggggctggtgtggttcgccagaccaccgttcagcgccggcggaggcggcggcggcgcgcactaagcctcacataaagggacctccgggtcccttttttacggcgtcaggttgtccagttctcgctagtttctgtctcgtttgcgaaagcccgtcaccctgcgctcgggcaggataaaggctgaccattaaggagaacactatgctgagccatcctgctgaaaagtaccgtccctatccgccgatcgccctgcctgaccgccgctggccagaccggcaaatcagtcacgccccgcgctggctctcgactgacctgcgcgacggcaaccaggcgctggcggagcccatggacagcgcccgcaaactgcagttctgggatctgctgctggagtgcggctttaaagagattgaagtcgccttcccttccgcctcacaaaccgatttcaactttgtccgccagctgattgacgaacagcgcatcccggaggatgtcaccatccaggtgctgacccaggcgcgagacccgctgatcctgcgcacctttgaggcgctgcgcggcgcccgccgggctaccgtccacctctacaatgccaccgcgccgctgttccgcgagctggttttcggcatggacaaggccgaggtgatcgccctcgcgacccgcgccacccggcttatccgtcagcagtgcgaacagcagccggagacccgctggcaatatgaatattcgcctgaaaccttctgcttcaccgagcccgagtttgcgcttgagatttgcgaagcggtggcggatgtctggcagccctgcgccgagcgaccgatgatcgtcaatctgccggcgacggtggaagtcaacacccccaacgtctatgccgatcagatcgagtatttttgccgccacttctcccgccgcagcgaggtctgcatcagcgtgcacccgcataacgatcgcggcaccggcgtcgccagcgccgagctggcggtgatggccggcgccgatcgggtagaaggctgcctgtttggcaacggcgaacgcaccggcaacgtctgtctggtgactttggcgatgaacctctacagccagggcatcgaccctgagcttcgcttcgagcagatgaaccgggtggtggaggtggtggaaaactgcaaccagatccccgttcacccgcgccacccgtgggcgggaagtctggcttacaccgccttctccggctcccatcaggatgcgatcaaaaaagggtttgatgcccgtcagcctggcgatccgtggcagatgccctacctgcccattgacccgcaggatataggctgcagctatgaggcggtgatccgcgtcaacagccagtcggggaagagcggcagcgcctggcttatcgaacaaaatcatggtctgaaactgccccgcgggctgcagcaggacttcagccagcacgttcagcaggccaccgatagcgacggcaaagagatgacccaccatgcgctgtggcagctgttccgcacgcgctacgggctgcaggcgcagccggcgctgacgctgctcgattatcagagcgccagccagcaggatggccagctttccctgcaggcaacgctgcgtcaccacggcgaaacccgacgcctgcagggccagggcaacggcctgctctccgccgcagccagcgggctcagcgcgctgtttcggcagccgtttatgatcaaggactatcatgagcatacgctcggcgcgcgcagcgacagccggtcggtggcctatatccgctgcgtttttccgcaaggagaaagctactggggcgtgggtatcgataatgacgtggcgcgcgcctcgctgcaggcgctgtgcaatgcgctcagcgccgccgatcaggccgggggacgaaaatagtcgctgggggcgacgcccatcacccgacgaaacatggcgctgaaggcgctgtggctaccgtagcccagctccagcgccacccgcagcacggagtagccctgcgccaggcgcaccagcgcttccattagcttcgcccggcgcacccactcgctccacgtcaggctagtctgctgctgaaaatggcggtttagggttcgctcgctcatgctgcacgccttcgccgcctggccgctgctccaggcctcgcccggcgcctcgcgtacctgctggcacagccgacgcagcgtttcgctttgcggctccggcaggccaaacggcaggatcgccatcccgcggatctcatcgaggatcagttcataaattctttcgtcgcggctggcgggggcatagcgttccgccagcgccagggatgacacgatcagttcccgcagcagcggcgtgatctgtacgatctggcagcccgccggaagatcggcgcgcgccagcggatcgataaacagggtgcgcgccgccacgttgccggtcatgcgcagcgcgtgcggcgttcccgccggcagccagacgccgcgcccgggcggcaccacccagtagcctaccggcgtcgcgactcgcaccacgccgcttagtatatgcagcagctgggcgcagtcatgctgatgccagtcttcctggtcaccgtgggcataatcatgggcaaagggcaccagtgggcggtgctgaaaggagaaggaaagcgtcgtcgtcatcgcggcgtcagaagagcggcccggcgacaggcgtcgggccgtggcggaagcactagatgtgcagttcctgcagtttttctttcggcaacgccagttcgtcgttgctgttgatgcgcacatcgcgctcaatgatatgacgagcgatgtcctgggcctcttccagcgagtgcatggtgtaagtcccgcactggtagacgttgagctccgggatctggttctgatctttcaccttcagcacatcggccatcgccgctttccaggcgtcagcgacgcgctgctcgtccggcgtaccaatcaggctcatatagaagccggtgcggcagcccattggcgaaatgtcgataatttccacgccattcccgttcagatgatcgcgcataaagcccgcgaacagatgctccagggtgtggataccgcgttccggcatcacttcctggttcggtacgcagaagcgcagatcgaaaacggtgatttcatcgccatgcggcgtgttcattttcttcgcgacacgcaccgctggggcttccattcgggtatggtcgactgtgaaactatctaacaacggcattcgtcacctccgggagtgaatttttttaaaataaaatgaactctttgttcagccgcgagtctcagtatatgaaagacgcgcatttattatcatcatcatccctgaatcagagatgaaagtttggccacagtgatgtggcctttttcttttccagcgctacgcgtgccgcgccagcagcgcctcaaacggctcgctgtcttcagcttccactttcttctgtcgcgccaccgacgcgtcgcgctcggcgataaaatcgtcttcgctcaggatctccagcggctcttcgcgcagctgcgtccggtaacgatcggcaagcgcacggccggtaccgccaatgccttcttcaatcatagaacgcagaatgcgggctgagaaggttaattccggatcgtcaaagcaggccagcagctcgtcgcagacctgctgatatgcctggccaccgtggatactgtccagggtctgcgccacgcggcgtaaatcgcggaacagatctttgcccacctgagccagcgggaactgcgcgctttcgcagccaatccccagcgttaagcccggcttacgcccttccagaataacccgattccagttggtgcgggtgcacagcagctcatcgctgctcatctccggcgcgtcggccagcgcgcaccagaccataaacaggtcgaggaaacgcacctgctgggcgtcaacgccgatcggcgagaacggattgatatccagcgaacgcacttcgatatactcaataccaccgcgcaacagcgcatcggacggggtttcgccccgacgggtgacgcgtttcgggcggatcggcgcataaagttcattttcaatctgcagaatgttgctgttgatctgcagatacttgccgtctttctgcagcccgattttggcgtactcttccgacggcgttttaatcgcccgcttcaatcctgccacatactcgtgcagatcgttaaacgtaattccgagattgctttgcgacttattggtataaccaaggtcgctgaggcgcagcgaggtggcatacggcaggtaatacatgccgttgcccgtttcctcaaagggcagcgttgtcggtttgccttgcaggaatgaggagcaaatcgccggcgaggcgccaaacagataggggatcacccagccaaagcgatagtagttacgaattgagcggaaatagcccgccgaaatggcctctttaccactctcggcatcttccacaccacattttgcctgccagaaggccatcggtagggagaagttatagtgcacgccggagatagtctgcatcagcgcgccatagcggttcttcagcccctcgcgatatagcgttttcaggcgccccacgttagaggtgccgtactgcgccagctcaatatcctgaccgggggcgatatagcatggcatgctcagcggccacatccgctcgtcgccaagctgacgcgcggtatagcgatggacatcgcgcataaaggtcagcatatgctcaatatcgccatctactggcgtaatgaactcaagtaaagcttcggcaaaatcggtggtaatccatttatgcgttagcgctgagcctaacgccggagggtgaccggtcgttgcaagggtgccgtctgcgttcacgcgcagcgtttcccgctccagaccacgttgaataccctgcagagcctgcggatgtttttccagccaggccagcgcctgtgatacgtccgggatcaatttgacctcccgcctgtcgaaatcgtttgaataagcataattgtaatggatgaactgtcagtccaattagtgccaccacgtcatgccctgaagcgtcgctgccgcaatagcgatatagcgcagcgccttaccaaggcataagaaaaagagtaccggtccccaggaaatgcgcatccatcccgccagcaaacacagtaaatcgccgacaaccggcgcccagctcagtaagagcgtgaccgcgccgtagcgcttaagccagccggccgcccgctcctgccagcgcgaggttttgcgcagcggaaacaagcgccccagaataacgttagttacccctccaaggctattgccgattgttgctattaatactaaccaccacggatgactgacccccgcaagtagcatagccaccagcacaacctccgaattgccggggagcagcgtggcgcttaaaaagctactggcaaacagcgaggtgagtgacagcgcgtcgctcacagcaaacgcacgtcaactgcgtccattcccgcgcgcttcgccgcctgcagaccaaagtcggcatcttcgaagacgacgcatttttccggcgcgacgcccatgcgctcggcgcacagcaggaaggtatcgggcgcgggtttatggttgaccacatgatcggccgccaccaccgcggagaagtaatgacgcagccccaggtgcgccagcagcgcttcggcgacggagctctcgctgccggttcccaccgacatcgggcgacggccgtgccatgccttaaccacctcaatcagcggcaacgggcgtacgctgtccagcagcatcgctttgacggcctgggttttttcctgcgccaggcgatgtggatcgagatcggcctggttgagttcgataatcgcctgggcgattcgccaggttggtgagccattgagcgcgaccatcgcctgttcgtcgaaacgcataccgtagcggcccaacacctcgttccatgcctgccgatgggtcggctcggtatcgagaatggtgccatccatatcaaagatcagtcctgcgtaaccttcgtacattgtcttctcaccaaccggtttgggaatgattactgtaacgcaaaagcccgccgttgtcgcggccagcggcgcagacgacaaaggcgccctcaggcgcccccaaaaattaggccggataaccagccttatttaatacgcagatcgttctcgaccattcgcacgccctgcactcggcgtgtgacttctacggctcgtttagcgctctccgcggaggagacaaatccgctcagctggacgcggcctttaaaggtctggacgctaatttctgaggacttaatgtctttatcgttaaagagcgccgttttcaccttggtggtcaccacggtatcgtcaatatagccgcccgtactctcctttgtagccgatcccgcacagccagcgagggccgtcgttaccagcagcgtcgcgcaaaaagcaggtattgctttgaaccatttcatggatttctctccttgcatttatctcagcctgataacgctgatatacaaggataaattatagtggaaagcgcgtcttgccaataaaaaagtcaggatgaagccagtgatggaaaacgaggtaatcgggatggtgagagaagagtgaagattatgcattcagaacgggtgctgcgataatttcgcagcctacgcaacaacatcgtcgttgttactgaggagaatatggtgcatccgggaggatgactcggctacgcctcgccctttgggccgttgcttacgcaacgttatcccccctggtgctggcgatgatttcgcagaccataaaacaacatcgtcgctgttactaaggagaatatggtgcatccgggaggattcgaacctccgaccgctcggttcgtagccgagtactctatccagctgagctacggatgcatcgggaaagctattttactgcggggttactctcctggcacttacgatggtttcgcaaaccagataacaacaatgttgctgttactaaggagaatatggtgcatccgggaggattactcggctgcgcctcgccctaagggccgttgcttacgcaacgttatcctccctggtgctggcgataatttcgcagaccataaaacaacatcgtcgctgttatcaaggagaatatggtgcatccgggaggattcgaacctccgaccgctcggttcgtagccgagtactctatccagctgagctacggatgcatcgggattactgctgtaattctgatatcaaatttcgcgatttgccattcttattaaagaatggtgcatccgggaggattcgaacctccgaccgctcggttcgtagccgagtactctatccagctgagctacggatgcatcgggaaacttgctttactacgcgtcagtgtcacaactaacacatgccacactgagtatgatggcctaatcggtagagtgactcgattatgcctcgcactgcgggccgctgctttcacagcgctcttctctcttaattcagaaagaagatggtgcatccgggaggattcgaacctccgaccgctcggttcgtagccgagtactctatccagctgagctacggatgcaaaatggcggtgaggcggggattcgaaccccggatgcagcttttgaccgcatactcccttagcaggggagcgccttcagcctctcggccacctcaccacacacgcctctttcgagtgcttcgaagaacttgtttctgctcttcgtcgctgcgatggcgcacatattactttctggtacttataagtcaaacactttttcgagaccttttttcgtttgcacacttcgcacgcaattcgcatgcaaaaacggcaaaaagggcaatttatcaacaggaaatcagccctgacgctggcataacgccaaacgaccaaagcggcaaagggtaatgaaaagcggtatggcgcagggggaaaaaacagaaaaagggaaaaagcggcggtaagtgatgcgcctcactgcacagcgaggcgcggaaaccttagtaactggactgctgggatttttcagcctgaatacgctggtagatctcttcacggtgaacagacacttctttaggggcgtttacgccaatacgaacctggttacccttcacccctaaaactgtcacagtgacctcatctccaatcatgagggtctcaccaactcgacgagtcagaatcagcattctttgctccttgaaagattaaaagagtcgggtctctcgtatcccggcattatccatcatataacgccaaaaagtaagcgatgacaaataccttagggtataagcagtcatggcatcacattctgttaaacctaagtttagccgatatacacaatttcaacccgactttatcgttatcagtgtttctgacgcaaggtgccgcaaccctctggttatggcacctatacccgtcatacttcaagttgcatgcgtgttggctttcctcgctcaccccagtcacttactagagtaagctcctggggattcgctgcgtcgccgccttcctgcaactcgaattatttagggtaaatgcgtttatagttattacagttttgcgctgacccagcctttcacactggctaacgctgcagggagagcagacgcatcggtaccaccggcctgcgccatatccggacgaccgccccctttaccgcccacctgctgagcgaccataccaaccagctcccctgctttcacgcggtctgtcacatccttagacacacctgcaatcagagaaaccttaccatccgctaccgtagctaatacaacgatcgtcgaaccgagctggttcttcagatcgtcaaccatggtacgcagcattttcggctcaacgccggtcagttcgctgaccagcagcttaacgccgttaatctcttccgctttgctggagaggtttgcgctctcctgcgccgcagcctgctctttcagctgctgcagctctttttccagctgacgggtacgctccagcgcggcgcgaaccttctcgccgagattgtggctgtcacccttcagcagctgagcgatatcattgagctgatcgctctgcgcatgcaggatggccatcgcgccttcgccagtcaccgcttcgatacggcgcacgccagcagcggtgccggactctgacgtgatgcggaacaggccgatatcgccggtacgcgccgcgtgagtcccgccgcacagctccgtggagaagtcgcccatccgcagaacgcgcacgcgatcgtcgtatttctcgccaaacagcgccatggcgccggatgcgcgcgcggcatcgatatccataatgttggtttcgatagccaggttacgacggatctgcgcgttgaccaggtcttccaccgcacgaatttcttccggcttcatcgcttcaaaatgcgagaagtcaaagcgcagcgctttatcattgaccagcgaacctttctgcgccacatgggtgccgagcacctggcgcagcgccgcgtgcatcaggtgcgtcgcggagtggttgagacggatacgctgacggcgagcctcatctacgtcggcctgcaccgcgtcacccactttcagtgtgccgctggcgactttaccgatatgaccaatagcctggccgtacttctgcgtgtcgctgactgcgaaggagaagcccgcgccttttaattcgcctttatcgcccacctggccgccggactccgcatagaacggggtctgatcaaggatcaccaccgcttcctggccagcgctaacgctatccaccgctttgccgtcgataaacagggcggtaaccttgccgttcagctccagatgatcgtagcctttaaattcagaggcgccgtcaacgcggatcatcgcattatagtcggcgccgaaaccactggactcgcgcgcgcggcggcgctgctcttccatcgcggcttcaaaaccagcttcatcaaccttgatgttgcgctcgcggcacacatcggcggtcaggtcgaccgggaagccgtaggtgtcgtacagacggaaggcggtttcgccgtccagggtgtcgcctttcagcttcgacagctcctcatccagcagcgccaggccgcgctcgagggtgcgggcaaactgctcttcttcggttttcagcacctgctcaacctgagcctgctgctgcttcagctcgtcgccggcggagcccatcacatcgatcagcggggcaaccagtttccagaagaaggtgtccttcgcgcccagcatgttgccgtgacggatcgcgcggcgaatgatacgacgcagcacgtagccgcggttttcattcgacgggatcacgccgtcggcaaccaggaaggcgcaggagcgaatgtggtcggcgataacgcgcagcgacttgttcgtcagatcggtcgcgccggtgactttcgccacgctggcgatcagatcgcggaacaggtcgatgtcatagttggagttaacgtgctgcagcaccgcggcaatacgctccagacccataccggtgtcgacggacggcttcggcagcggctccatggtaccgtcagcctgacggttgaactgcatgaagacgatgttccaaatctcaatgtaacggtcgccatcttcttccgggcttcccggagggccgccccagatgtgatcgccgtggtcaaagaagatttcggtgcacgggccgcacggaccggtgtcgcccatctgccagaagttgtcagaagcaaacggcgcgcctttgttgtcgccgatgcggataatacgctcgcgcggaacgcctacttcattggcccagatgtcgaaagcttcgtcatcggtctcgtaaacggtaacccacagtttttctttcggcagcgcgaaccagttctcaccggtcagcagttcccacgcgtatttgatggcatcctgcttgaagtaatcgccaaagctgaagttgcccagcatttcaaaaaaggtgtggtgacgcgcggtgtaaccgacgttttccagatcgttgtgtttaccacccgcacgcacgcaacgctgtgcggtggtcgcacgcgaataattacgtttgtcgagaccaaggaagacatccttgaactggttcatccctgcattggtaaacagcagggtcggatcgttgtgcggcaccagggagctgctggcaactacctgatgtcccttgctatggaaaaagtcgagaaacgcctgacggatctcagcggtgctcttgctcataattatcctgaaatcaagctacacgtcatccttcaagtcgcctctgtcctggctgcgcttgctcttccggcaccgaactgacgtacgttgcgaaagagagtctctcttgccgccctgatgcagcttgaatgattttgtgtaaaggaataatcgcccaggccgctgcctgcacagtcacaaccagcggcccgacggaataaagtgggaataagataagttttctttacggcgaagtaaaatcccggatgggtcaatctgcaaaatttcgccagatttcctggatatcttccatcaggtagccgcggtaaagcaggaatcgctgaactttcactttttcagtaaaggcggaaggtaacggttcgccgtatttacgctgtgcctgctccctggcaaggctcacccagtcgatatcgcattcgcgcatcgcctggtcaacgacctggcgcgcaatgcctttctggctgagctcctggcgaatgcgcgccggaccatagcccttgcgactccggctggcgatgaactggccgacgaagcggttgtcgtcaaggtagcggttttcgatacaccaggcgacaacctgctccagctcgtcgggggtggcgtccagcgcctcaggaccgtttttgctcatcaccggagcgaccagcttgcgtcgcagctcctgctcgctgtggtcgcgcatcgccagaatgcggatagcacggtccagcaggcgggcgtagccggagcggcgtgatgaaggttcagtcacaggcacctcgataatctcacaaagcaaaagggctgcctaagcagccctgtcagtcttgcagacgatatcagaaatcctgttcggtttcttctgcgtcgttgccgtcaacaacgaagtctggcttcgcatcctgattgttgagcagcagttcgcgcactttcttctcaatctctttcgccgccgccgggttctctttcagccaggtgatcgcgttcgctttaccctgaccgattttgtcgccgttgtagctataccaggcacccgctttctcaatcagcttctcttttacgccgaggtctaccagctcgccgtagaagttgatgccttcgccgtagaggatctggaattcggcctgtttaaacggcgcggcaatcttgtttttcaccactttgacgcgggtttcgctgccgacgacgttgtcgccctctttcaccgcgccgatgcggcgaatgtccagacgcacagaggcgtagaacttcagcgcgttaccaccggtagtggtttccgggttaccgaacatcacgccaattttcatacggatctggttgataaagatcagcagcgtgttggactgcttcaggttacccgccagcttacgcatcgcctggctcatcatacgcgccgcaaggcccatgtgagagtcgccgatttcgccttcgatttccgctttcggcgtcaacgccgcgacggagtcgacgacgataacatcaaccgcgccggagcgcgccagcgcgtcacagatctccagcgcctgctcgccggtgtccggctgagaacacagcaggttgtcgatatcgacgcccagtttgcgtgcatagaccggatccagcgcatgttcagcatcgatgaacgcacaggttttaccttcgcgctgcgctgcggcgataacctgcagcgtcagggtggttttaccggaggattccggaccgtagatctcgacgatacggcccattggcagaccgccggcgcccagcgcgatatccagagaaagcgagccggtggagatggtttccacatccatggtgcggtcttcacccaggcgcatgatggagcctttaccgaattgcttttcgatctggcccagtgcagccgccaacgctttctgtttgttttcgtcgatcgccattgttactcctaatcatgcagggtaaagcgtgttcgcttcgccgttaatatttgttcagttgaggcaattatactgtatggtcatacagtatcaagtgttttgtagaaattgttgccagagcagatttagcgcataggccgtcgcctgacgacgcaccgcttcgcggtctccggcaaagcattcccgccgcgtcaccccttgcccgctcacgctggcgacgccgaaccataccgtgccgaccggcttttcgacgctgccgccatccggcccggcgacgccgctaacggagatggcataatccgcacgcgccgcgcgcagcgcgccaatcgccatctccaccaccaccggttcgcttaccgcgccgttgtcgcgcagcgtcgcttcgctgacgccgatcatttgcgatttagcttcgttgctgtaggtgacaaagccgcgttcaaaccacgccgagctgccggcaatatcggtgatcgctttcgcaatccagccgccggtacaggattccgccgtggtcaccgtcgccccacgcgccttcagcgcccggccaatcttctcgcttagctgcattaattctgaatcggtcattatcgccccgctttgctctggataaagaggccatcaaagatagcactttcgacagagatatggggatgaagtggcgattttacgaggggggatccagaaatgggtcgtcctgtgataaccaggacgaccagacaacctgttacttcatgcttttagcgataagctcaacgttgtgacgcatcattttgacgtaactatcggcgacgccgcccggcttagacagcgcttccggatagagttcgccccccggctgcgcgccggtggcgctggcaatctgcttcaccagccgcgggtcaagctggttctccataaaccaggtatggacgccatccgctttgatttgcttaatcagcgccgccacctgcgccgtgctggcctcgctctctgaagagagcccctgtggcgcgaggaaggtcacgtggtaagcccggccaaaatagccgaaagcgtcatggctggtcaggaccttgcgcttggccagcggaatggcgctgaactgcgctttcgcccagccgtcgagagacgtcagctggtcgatatagcgcttgccgctgctggtcaacgccgctttatcttccgggtcggctttcaccagaccatcgaggatattctgcgcatacaatgcgccgttcgctgcgctgttccaggcgtggggatcggtcaccgttttaccctcttcatcaagggtatgggtcttgacgcctttcgatgccaccaccagctcgcccttaaaaccagaggccttaatcaggcgatccagccacccttccagccccaggccgttaaccaccaccacgtcggccttgctgagcagcgcgctatccttcggcgacggttcgaaggtgtgcggatcgccgtccgggccgaccagggtatccacatggacatgctccccgccgacctgctgcgctatatcacccaacaccgaaaaactgcttaccacattcagcgttttcgccatggccccctgcgccatcaggccgagggccagcgcgaccactattgcactacgtttcatcatttccttaccccatcaatgtgcgccaaccgaccagcagccggctgcgcgtgccaaaaaatagcgaaacaaaaaacagtgcgctggcggtcagcacaatagcgggcccggcgggaagactaatcgcccaggagaggcttaatcccagccaggcgcagagcgcgcccattcccgccgccagcagcagaatgcccggcagcgtgcgcgcccagcagcgtgcggcgaccgccgggagcatcattacccctaccgccatcagcgtgccgagcacctgaaacccggccaccagattaagcaccagcagcgccagaaaaagcccatgcagcagcgcaggcagccgccggtgattcacctgcagccaggcgctgtcgaacgcctcgcagaccagaccgcggtagcacagcgcaatgcacaatagcgtcaggctggcgacgccgctgacaaacagcgccgcatcgcggtcgaccgccagaatggagccaaacagcagatgcaggaggtccacgctggagccgcgcagcgacaccagggtgacgcccagggccagcgagcccagataaaatccggcaaaactggcgtcctcttttaacggtgtccgccggctcacccacccggccaccagggcaaccacgatgccggcgatgaagccgccgagggtcatggccagcagcgacatgccgctcagcagataccccaccgccacgccggggagaatggcgtgcgacagcgcatcgcccatcaggctcatgcgccgcagcagcaggaagacgcccagcatggtggtgctcagcgacagcgccagacacaccacgagggcccgacgcataaagccgaattcaatgaaaggctgaaagaaggtgtgccagatcatgccgacctcacatgactgaaggccgggagcaccgcccgggtagcgccccagcaggcgcgctggggagtcagcagcagcgtctcggggaaaaagtcggccacccgctggttatcatgcagcaccgccaggatggtctgtccctgccggtgcatctcgaggatcaaatccattagttcgcgactggtcgcttcgtcgataccggtgaagggctcgtcgagcatcaccagcggcgcctgctgcaccatcacccgggcaaatagcatgcgctgaaactggccgccggagagcgcttcgatcggcgttttcgccaggcccgccagcccgacccgctccagcaccgcgccgatgcgtcgccgggtgccgccccccagaccgcgcagcagcgacacgccgggccatgcgccctggcttaccacatcctgcacgttgagaggaaactgcgactcgagggcatggcgctgcgccagccagccgatcaccggccgtgttccctgccagcgcaggcggccactgaccggcggaagaaacccggcgagggttttcagcagcgttgattttccgcagccattgaggccaacaattgccgtcaggctgccggggcatatcatcccgctcagcggaggggtgatcgctaccccgtcatagccggcgaccagctgctccagttcaatcatggcagcgtcaccgcccaccaggttgctaaccatagcgccgccagcagcacgcctgcgatagccgcgcgcaccgcgccggatgccataaaaatcgatgtgaacatatccccgcctcaatttaatgttataacataacaataacgaagcgaagaaagaatgtaaatcagcgtcattcagcggaaatgtaacaaaggtcaacaagaggcatggagacgggaaaaaacgggaagataagcgcggcctccccggcgtcatcccccggtcgcgctgcgcttaccggggctagcaaccggataccagaccgtagcccggataaggcgctacgcgccgctatccggggaggctgggaaattgtcagccggatgaaaggattaataaccgccgcgggcctgcgcaaccgccaggcccagctgccagacagccatcgcgtagtgggtgctgtggttgtagcgggtgatggtgtagaagttcggcagcccgtaccagtactcatagccggtgccgacgtccagccgcagcaggctggcctgctgatggttacccagcggctgggtcggggtcagccctgcggccgccagctgcgaaacgctgtatttagtcttgaaaccattctccagccccggggcctgccccagcgcctgcaccgccaccagatcgccgctcacccagccatgctgtttgaagtagttggccacgctgccgatagcatccaccgggtcccacaggttgatatgtccgtcaccgttaaaatcgaccgcatactgcttataggaggacggcataaactgaccgtagcccatcgccccggcgaaagagcctttcagatccagcgggtcgtcgctttcgctgcgcgccattagcaggaaagtttccagctccgacgagaagtattcggcgcggcgcgggtagctaaacgacagcgtcgccagcgcgtcgaggatccgggttttgcccatcacccggccccagcgagtctccacgccgataatgccgacgatgatttccggcggcacgccgtaaacctgataagcgcggttaagcgcgtcctgatactgattccagaacaccacgccgttctgcacattatccggggtaatgaactgtttcttgtagcgcagccaggcgccggtcggcccggttggcggcaggccggtcggcgcctgacgatccatcagccgcaggacgtaatccaggcgctttgcctgcgacaggatctcctgcagctgctgcctgtcgaagccgtgcttcgccaccatcttatcgataaactgcgccgccgccgggttgttggcgaagtcgccgcccatctgcatcacgttatgctgcggttccagcaaaaagccgccggttccactcgccatctccgtttccgcgggggtcttgggtttgctgctgcaggcagcgaggagcacacaaaggggaagtaaagccagatagcgacgcttcaacatgggaattccgtttaacaaattcagcaagggataattatggtaaagcatgcgacgaccaacaagaaagcgacaatctgtttgtagacaaaatagtccttcaacggctcctcccctgcgtgctttcatgccctgcaatatttcatctcgcccgcatcatctttcaaaataaaatatttatctttcattttgcgatccatttaacacttttaaacctttcaaaatgattaaaatcagcctgcgattagcaagaaaaataacatgctgaaggagagaacaatgattgacgtcgtgacccacggcgcggagtggtttatcggcctgtttcagaaaggcggcgaggtatttaccggcatggtgaccgggatcctccccttgctgatcagcctgctggtgatcatgaacgcgctgatcaactttatcggccagcagcggatcgagaagctggcgcagcgctgcgccggaaacccaatctcccgttacctgctgctaccctgcatcggcaccttcgtgttttgtaacccaatgacgttaagcctcggtcggtttatgccagagaagtacaagcccagctattacgcggcggcgtcgtatagctgccactcaatgaacggactgtttccacatatcaaccccggcgagctgttcgtctatctcggcatcgccaacggcctcactaccctcggcctaccgctcggtccgctggcggtgagctacctgctggtcgggctggtgactaacttcttccgcggctgggtcaccgacctgaccacctcgattttcgagagaaaaatggcgattcagctttcccagaaagtgcatctgtcaggagcgacatcatgacccgtattcgtatagagaaaggcaccggcggctggggcggcccgcttgagctcgacgccgtcgaaggcaaaaagatcgtctatatcaccgccggcacccgcccggcgatcgttgaccgcatcgccagcctgaccggctggcagccggtggacgggtttaaagagggggaaccagcggaaagcgacatcggcgtggcgattatcgactgcgggggcaccctgcgctgcgggctctatcctaagcgccgcatcccgacggtgaatatccatgccaccggcaaatcagggccgctggcccagtacatcacggaagatatttatgtctccggcgtcaaagaggacaacatccagtgcatcgctcccgacagcgcaggggtttccgagccgccggcggaaaacaagagcgcgggtcgcgattacgacaccagcaagaagattactgaacagagcgatggcctgctggcgaaggtcgggatgggcatgggttcggtggtggcggtgctgttccaggccgggcgcgacaccattgatacggtgctgaaaaccattctgccgtttatggctttcgtctcggcgctgatcggcatcatcatggcctccggcatcggcgactggatcgcccacggcctggcgccgctcgccagccatccgctggggctggtaaccctggcgctgatttgctctttcccgctgctgtcgccgtttctcggccccggcgcggttattgcccaggtgatcggcgtgctgatcggcgttcaaatcggcctcggcaacattccgccgcacctcgccctgcccgccctattcgccattaacgcccaggccgcctgcgattttattccggtaggcctgtcgctagccgaagcccgccaggataccgtgcgcgtcggcgtgccgtcggtgctggtcagccgctttctgaccggcgcaccaacggtgctgatcgcgtggttcgtttccggatttatttaccagtaagaggttcctgcagatgactgtgatttaccagaccaccattacgcacatcggcgcctgcgcgacgatggcgctggaagagcaaatgctgatcaccttccgcgagggcgccccggcggatatcgaagagtactgctttattcacaaccacggcaagcttgctggcacgctgcagccgggggcagagctgcagcttggcgaacagcgctacccggtgaccgccgtcggcgaggtcgctgaacaaaacctgcgcgagctgggccacatcaccctgcgctttgacggccatcgtgaagcggagttcccaggtaccgtccatgtggcgggcccggtgccggacgccatcgcgcccggctgcgtactgaagtttgttgcttaaaaggagagagagatgaatcaggttgctgttgtcattggcggtggacaaaccttaggagagtttctgtgccgcgggctggccgccgagggctaccgcgtggcggtggtcgatattcagagcgaaaaagccagccgcgtcgcccaggagattaacgctgagtatggcgaaggtatggcgtacggcttcggcgccgacgccaccagcgaggccagcgtcaccgccctggcccacggggtggatgagattttttcgcgcgtcgacctgctggtgtacagcgccgggatcgccaaggcggcgtttattagcgacttcgcgctgggggatttcgaccgctcgctgcaggtcaatctggtgggctattttctctgcgcccgcgagttctcgcggttgatgatccgcgacggcattaaggggcggatcattcagatcaactcgaaatccggcaaagtcggcagtaagcacaactccggctacagcgcggcgaagttcggcggcgtcgggctgacccagtcgctggcgctggatctggcggaatatggcattaccgtgcattcgctgatgctcggcaatctgctgaagtcgccgatgttccagtcgctgctgccgcagtatgccaccaagctcggtatcgatgagagcgaagtcgagcagtactacatcgacaaggtgccgctgaagcgcggctgcgaatatcaggatgtgctgaacgtattgatgttttacgctagcccacaggcgtcgtactgcaccgggcagtcgatcaacgtcaccggcggccaggtgatgttttaacaggttcccggatggcgctgcgcttatccgggctacaaaactgtaggtcgggtaaggcgttagccgccacccgacaaaaaaacggcaccgcgggtcgctcgggttaggcgctcgcgccgtgacctgggctgttcccgccccccttaaggagagacctatggttactgcattaatcatcgtcgccgccatcgcctggcttacccagctggcctttggcggctggcagatccgccgcttcaatcgcgcctttgatagcctgtgccagcaggggcgggtgggcgtcggccgctccgccggacgctttcaaccgcgcgccatcgtcgccatcgccgtcgatgataacgaccgcattagcgacacgctgctgatgaaaggcttcaccattttcgccagtccgcaaaagatcccggctctggcaggcaaacatattgcggaattgcagcctgatgtgatctttccccatgatccgcgctgtcagaatgcactatcattagcgcttaatccgaaacatggataatttcgttgtaaaagtaaatatcttgcgaaattatcacttcgaaacttaaacgcaggatagacgcctatgaaaccacgtcagcgccaggcagccattctcgagttcctgcagtcgcagggaaaatgctcggtcgaagagctggcgcaacacttcgataccactggcaccaccatccgcaaggatctggtcacgctggaaaacgccggcaccgtcattcgcacctacggtggcgtggtactcaacaaggatgaagccgatccgccgattgaccataaaacgctgatcaacacccataaaaaagcgcagattgccgaggctgccgtgcgatacatccacgatggcgattcaattatcctcgacgccggcagcaccgtgctgcagatggtgccattgctgagtcacttcaataacatcacggtgatgaccaacagcctgcatatcgtcaacgcgctatcagagttcgataacgagcagaccatcctgatgccgggcggcaccttccgtaaaaaatcggcctcttttcacggccagctggcggaaaacgccttcgaacagttcagcttcgacaagctgtttatgggcaccgacggtatcgatctgaacgccggagtcactacctttaatgaggtctataccgtcagcaaagcgatgtgcaacgccgcccgcgaagtgatcctgatggccgactcatccaagtttggtcgtaaaagccccaatattgtctgcggccttgaacgcgtggataaattgattaccgatgccgatattgacccggaattccagcgggcgctggaagccaaaggcattgaagtcattattactggagaacatcatgagtaactttttgttagaggccggacgccagaccctgatgcttgagctgcaggaggcgagccgcctgccggagcgcctgggcgacgacttcatccgcgcggcggaaaccattatccactgcgagggcaaactgattgtctccggtatcggtaaatccggccacatcggtaaaaagctggcggcaaccttcgccagcaccggcaccccggcctttttcgtccatccggcggaagccctgcacggcgatctcggcatgctcgatagccgcgacgtgatgctgtttatctcctactccggtagcgcgaaagagctggatctcatcgtgccgcggctggaagaaaaaggcattccgctgctggcgatgaccggcaaatccacctcgccgctggcgctggcggcgaaagcggtgctggatatcgccgtggagcgcgaggcctgcccgatgcatctggcgccaacctccagcaccgtcaacacgctgatgctgggcgacgcgttggcgatggcggtgatgcaggcgcgcggtttcaatgaagaggatttcgcccgttcccacccggcgggcgccctcggcgcgcggctgctgaacaaagtgcatcacctgatgcgccgcgacgaagaagtgccgcgggtcaatgccgaggccaacgtcatggacgccatgcttgaactaagccgaaccgggctcggcctggtggcggtctgcgatgaagccaaccgcgtgcagggcgttttcaccgacggcgacctgcgccgctggctggttgctggcggtacgctcaacgatggcgtcactcgggcgatgacccgcaatggcgtaacgctgcaggcggatagccgcgcggtggaagccaaagagcgactgatgaaacacaaaatcagcgccgcgccggtagtggatgagaacggccaactggtcggcgccattaacctgcagaacttttaccaggcggggatcctttaagacccagacgtttcgccagccgatgcaggttggcgacgtccagttccagcgctcgggcggtcgccgcccagttgccctggttagcctccagcgcgcggctaatggcttctcgctgaaaagagtcggtcgcctcgcgcagattgatgtttcccgtcgcgggcgccgctgccgccgtctcagtcggcaacatcggcgccgccaccgcaaactggaaatgctgcggctccaggaccacttcatcaccggcctgggtggcccgcgccagcaccaccgcccgatggatagcatgctccagttcgcgcacgttgcccggccaggaccacttctgcagccggtttcgcgccgcctcagccaaaatgacccgcgccagccccatccgcaggcggcactgctcgcagaaatagcccgccagcagcaccacgtcactttcccgctcgcgtagcggcggaaccgacagcgggaagacgctcagccgatggtacagatcggcgcgaaagcgcccttccaccacctcctggcgcagatcgcggttcgtcgccgccagcacccgcacatcgacccgcaggctgcggtcatcgccgacgcgctgaatatcgccatactgcagcacgcgcagcagtttggcctgcagcgccagcgacagttcgccgatttcgtcaagaaacagggtgccgttatccgccatctcaaatttaccgctgcggttgctgatagccccggtaaatgcccctttcacatggccgaacagctcgctctccgctacgctttccggcagcgccgcgcagttgaggtacaccagagggttggcggctcgcggcgatccctggtgcactgccttcgccaccagctctttgccggtgccggtttcgccgctgatcagcacgtttaaatccgaggcggcgacgatatcgatctcttttttcagctgcagcatgggccccgacaggccgatgatctcctggcgctccggcagcgggtaattcaccgcctgcgccggcaggacgttttgcgcttcaaggcgggcgataagcagcgcattattcagcgccccggccaccagcgcggcaatcagccgcagctcttcatcgctgaagctatcgaaacgatcggcatccatgccgtccagggtcagcgcgccaatcagcgtctgcccggcaaacagcggcagtcccacgcaggcatggactttgaggctctcatgaccggggatcagcccgtcataggggtcgggcaggtcgctatccgccgggaagcgcaccacatccccggcgcgcgcaatcgcctccagccgcgggtgtccttccagggcaaagcgccgaccgagcacatcctgcgccaggccatcgatcgccagcggcacaaactgatgcgcctcatagcgcagcagcgccgaggcatcgcagccaagaatttgccgcagggtagtaatcaggcgcgaaaagcggtcggtgtgaccaatatcgctttgtaaatctatggcgattctcgccagctcgtcgacggaaaaactcattgccgctccattgtcattttgacaatacgcattgtcatatcgactattttaaccattgtcattttgacaacaaccaaaatcagaaaaaattaaaaacagataattatcaattaattaaaaagttggcacgcaacttgatataagccagtcaactgagtttaaacacactgtattgattgaggttgctatgtctattgtggtgaaaaataacattctttgggttggccaacgtgactgggaagtgcgtgatttccacggcaccgaatataaaacgctgcgcggcagcagctacaacagctatctcatccgcgaagagaaaaacgtgctgatcgataccgtcgatcataaattcagccgcgagttcgtacagaacctgcgccgcgaaatcgacctagccgacctcgactatatcgtcattaaccacgccgaagaggaccatgccggcgcgctgaccgaactgatgatgcagatcccggatacgccgatctactgcaccgccaacgccatcgactcgatcaacggccaccatcatcatccggagtggaacttccacgtggtgaaaaccggcgatactctcgacatcggtaacggtaaacagctgatcttcgtggaaacgccgatgctgcactggccggacagcatgatgacctacctgaccggcgacgcggtgctgttcagcaacgacgccttcggccagcactattgcgacgaacatctgttcaacgatgaagtggaccagactgaactgtacgaacagtgccagcgctactacgccaacatcctgacgcccttcagccgcctggtgacgccgaaaattactgaaatcctcggcttcaacctgccggtggagatgattgccacctcccacggcgtggtctggcgcgataacccgacgcaaatcgtcgagaaatacctcgagtgggcggcggattatcaggaagatcgcatcaccatcttttacgacaccatgtccaataatacccgcatgatggcggacgccattgcccaggggatcaccgaggttgacccacgggtagcggtgaaaatctttaacgtcgcccgcagcgacaaaaacgacatcctcaccaatgttttccgctcgaaaggcgtacttgtcggcacgtccaccatgaacaacgtgatgatgccgaaaatcgccgggctggtggaagagatgaccgggctgcgttttcgcaataaacgcgccagcgcctttggctcgcacggctggagcggcggcgcggtagaccgcctgtccacccgcctgcaggatgccggctttgagatgtcgctgagcctgaaagccaaatggcgcccggatatcgacgcgctggagctgtgccgccaacacggtcgcgacatcgctcgccaatgggccctctcgccgctgccggttgctgaagcagcgacaacgccggaaccacaggactgcgcctgtgccgcggccgcggccgccgatctcggtcccatgatgcagtgcagcgtgtgccagtgggtctatgacccggcgaaaggcgaacctaatcaggatgtacagccgggtacgccgtggagcgaagtgccggacaatttcctctgccctgagtgttctcttggcaaagatgtctttgacgtactggcgacggaggcaaaatgagtgatggcatcgtcatcatcggctcgggcttcgcggcccgccagctggtgaaaaatattcgtaagcaggatgcgcaaatcccgctgaccctcatcgccgccgatagcatggatgaatacaacaaaccggacctcagccatgtcatcagccgcggacagaaggccgacgatctgaccctgcaaagcgccggcgagttcgccgagcagtacactctgcgtctgtttccccatacctgggtaagcgatatcgacgccgaaaaccggttagtgaagagccacgataaccagtggcgctacgacaaactggtactggccaccggcgcgacgccgtttatcccgtcggtaccggggcgcgagctgatgctaacgctcaatagccagcgcgaatatggcgcggcgcagagccggctgcacgacgcgaagcgcgtgctgatcgtcggcggcggcctgattggctgcgaactggcgatggatttctgccgcgccggtaaagcggtaacggtagtcgataactccgccagcgtgctggcggcgctgatgccgccggaggccagcagccgcctgcagcatcggctcaccgagatgggcgtacatctgatgctgaaaacgcagctggaggggctggagcaaaccgccgacggcattcgcgtcagtctcgatcgccagcgcgcgataaccgtcgatgcggtggtggccgccgccggcctgcgcccggaaacgtcgctggcgcgccacgccggactgcagattaaccgcggtattgtggtcaatagccagctgcaaaccagcgacccggcgatttatgcgctcggcgactgtgcggaaatcaacggcgtggtactgccgttcctgcagccgattttactcagcgccatgtgcctgagtaaaaatctgctggcgcaggcgggagaactcaagctgccgccaatgctggtgaaggtgaaaaccccggatctgccgctgcatctggccggcgacacccgccgcgacgatctgacgtggaacatcgtggccgccaaagaggggctggtggcgaaaggcgtggatgccgaaaaccagctgcgcgcctttgtggtcagcgaagacaaaatgaaggaagcctttgcgctgctcaaacaactggtaagttgatggttttcccggcttgcggcgtaaacgccttagccgggctacggtattgtcctggtagcccggctaagcgcagcgcaagccgggaacatatccagcctagcgcgccagattgtcgtagccgcgccagcgatagttaagcaccgatagcgcccaacaggcgacaaacaacccgaccaccacaaatccggcgtcgccgaggttgtcgtttaacgcccctacccagcgccatattccgccgctgagcgcaaacttatccatcagcaggcccagcgcttccaggccgccgataaacagcgccaccaccaccgaggtgccggtgatggtcatgttgtaatagagcttgcgctgcggtttgctgaacgcccagccgtaggcgccgaccatcagcacgttatcgagggtatccaccagcgccataccactggcgaacagcgccgggaagaccataatcgaccagacggaaatcccgctcgacgcgccggcggcggagatacccagtacgccgatttcggtggcggtatcaaaaccgaggccaaacaggaaaccgaccaggtacatctgccagctgcggcttatcagacggaaggtcttgccaaacagccagctcatcatgccgccgccgctgacgatttcgtcgctgaccttttcaccgcgcttccatgcctggaagctgcgccacacgctgcgtaaaatcaccaggttgataaaggccatcgccagtaaaaacagggccgacacggcggtgccgataacgctgccggtatcatgcagccagctcatctgcgtgctgaaggcggtggcggtcgcggcaatcgccgccgaggccagcaccacaatcgatgagtggcccagcgaaaaccacgccccgacggcgaaaggccgccgcccctgctgcatcatcttgcgggtcacgttatcaatcgccgcaatatggtcggcgtccaccgcgtggcgcaggccgtagccccaggccagcaggctggcggccatcagcgcgccgctgtcgccaaaggcctgcagcgcccagcaccaggccagtaaattcgccgcgatcaaccccagcaccagacccgcggcgcgcggctgctggcgtaaaactgtcattatcatggttgtattccttgagcctgccagcgggcggcggcgatcaccgcctgaccataggcgattgcgccgtcgccggccggcaactgctgtgcaaacagcagagtaaaatccgccagataaaaggtcaatcgcgccgccagcaggcggttatgcagccccccgccgctgcagaccatcgtgtcgatgccgcggacggtggcgcagtcgcgggccatcgccgccagcccacaggccagggcgtcgtggaatgcccaggctttctgcgccggagtcgcctgccagctcagccattgccgccagaaggtcgctaaatccagcgcgtcgtcgcgccacggcagcgtaaccgggtggctgacgccggggcagctggcggccagcgcctccagccgacaggccgcttcgccttcatagctcagactctccggcgcgcaatccagggcgcaggcaacggcatcaaacagccgtccgcaggatgaggcgcgcggcgcgttaatcccgcgctcgatggcctgcgccagcagcggccagttgcgctggcgcagggtggcggcctgcggataatcctgccagtcagggacaaaggccagacagtgggccagcaaatttcgccacggctggcgtgccgccaggtccccccctggcagcgcgacggccggcagcccgccaagatgttcgcattcgcgatagttgacccgcaggcactccccgccccacagcgcgccgttctcccccataccaataccgtcgagtgtcagggcgataacgtccccgccgtcaagcggccagcggtgctccgccaggcatgccgcggcgtgggcatggtgatgcagcactgtctccagcggcaggggcagggaggccgcccactgcgttgagcgatagccgggatgggcatcaaccaccacccgctgcggcacaaacgcgtaaatgctctgcatcagctgcagggcgctgcgccactgctgttcaacaccttcctcgccaagatcgccaaagtgctggctcagcaccgcttcgctgccgcgcgccaggcagaaggtatttttcatatccgcgccgagagccagcagcggcgggatgtctcctagccctggcggcagcggcagcgcgtccgggacgtagccccgggcgcggcgcagcatttcaccgcttgagcgcaccagtgaatcatccatccgctgtacgatgtcgcgattatgcaagagaaagccgtcggcaatgtcggctaactcattgagcgcctgagcattacttaacgtcggcggacggccgctaaggttgccggaggtcattacgatggggcgcgccaggccctgcagaagcaaatgctgcagcggattagacggcagcatcaccccaacttccgcaagccctggcgctatttcgtcgcacaggccggagacctgcgctttggcaatcagtacgatgggcgccgccggggagcccatcagcgccgcagcggcggcgggtaagcccgttgccgtcggcagcattaccgccagcggttttgccgggcggtgttttcgcgcccgcagcgtggcaacggcagcggggttaccggcatcgcaggccagatgaaagccgccgatgccttttatcgccacgattttgcccgccgccagccgggcgatagccgcctgcagcgccgcctcgccgtccagcgtttccccctctgcccgccattccagtcgcggcccgcagtcggggcaggccaccggctgggcgtgaaaacggcgatcggcaggatcgcggaattccgcctcacaaggggaacagagcgggaacggcgccattgcggtgaagggccggtcgtagggcatggcgcgaataatggtcaaccgcgggccgcagtgggtgcagttgataaaggggtagcggtagcggcgtgcccggggatcgttcatctccgcgaggcacgccgggcaggtcgcggcatcgggcacaatctgagtccgcatccgtcccgccccgctctcgcggatggtgaaatcctgcggcgtggccgcccagcgatagggaatgcaggcggtactgtcgatccgcgccagcggcgggcagtggtcagccagagcggcagtaaaaccgtcgtcgcccccgaccagccgcaccagtacgccgtcgccgtcgttacagacatcgccgcagcgggcctgcgcccgggccagctgccagacaaaggggcggaaccccaccccctgcactttaccgcgaatgcggatttgcaccccgttcatgccttgacttaccaggccagcgccgtacggcgacgtttctcgatattcatctgctcaagtttgttgcggtcaacgcacaccagggcgtgcgtcgggcacacttccatgcaggccggaccgctctcgcggtggaagcagagatcgcacttgttggcttcggctttttccgccacgacgttcagtccggcgccgctatggcggatcaccgggcgcaccaccacctccatcgccccgtacgggcaggcgacgacgcaggttttgcagccgatgcaacgctcctgcatcacatggacaaagcctttatcacggctgatggcgccgttcgggcagacgttggcgcagggggcgtcttcacactgacggcaggcggtcgccgtggaaacattgacccctttgatcacgtgaatacgcggctgaaaggtgtgaggcgtcagggaggcgcagtcctgatgttcctgatgggataccacgcaggccacttcgcaagtgcgacagccgatacatttgctcgcatcggcgataatgaaacggttcatccatttctccagcagtaagaaggttacgcgccggagtatgcataatacgttccaagtttttaatatattgattataaagactattatagctgggctttgctgtcatcgtcagtagtgacgatgacagctgacgacgtcaggcacaggggcccgccaccagcgactcgcgttcaatcagcgctccgggaaagctttgctgaaagttgaattccccgccatccagcataaagatcagccgattgatgctctctttaatcatctccgtcaccggcacccggacgctggcgagcgacggcaccatatacggcgcaagagcaatatcgtcaaaccccaccaccgagacctgttctggcaccttaacgcccagctggtgaagctgcttcatcgccccgatggccatatcgtcattgctcgccaccagcgcgctgtaggtaaccccgcgcttacgcaggctctccacccccgccgccccggtttccggcgtccagcgcccttcggcgataagcgcctcgttcagggcgatgccgtggccagccagcgcgtctttgtagccggcgaggcgttcgacgccggtgggagagtcaagggagccggtaataaaggcgatattgcgatggccaagcgcaatcagccgctccactacccgcatcgccgaggctttttgatcggaccagacgcagtggctggcgtggcggcgcaggcggcgattaagcaccatgatcggctgcgagtggttctcaacgatctcgtccatctcatcgacggtgagaaagcgcgggtagatgatgatcgcatcgcagcgcagatccagcaggtactggatcgcctcccgctcctcttgcgcgctgtgcttgccgtcggccaggatcagctgccgccctttatcctccgtcatccgcgccacgtgatacagcagttcgctaaaatagacgccgtggtacagggtattggtcaccaccaggccgagggtttgcgtggttttggtcgccaggttgcgcgccagcagattaggccggtagccgctctccgccaccgccttaaacacccggtctttggtctcctggctgacatagccgttgcccgacagcacccgcgaaacggtcgccttcgatacccccgcgcgctttgcgacctccagcatcgttgccatgtgattcttcctgttgcaaaagttgcaggcagtgtactgcacgtttcccgcttttacagcactcccctgttcatcaccgcgatccggctcacggcgacgcttagcgatcaaaatcacaaaattgagatcatatttttttatttcttgtgaaattaaatgaaactcaccatgattttgtggaaccggtttcctataaaaacatggtatcgcccggcgatgcggggcggtggcagatcagtaccctattgataaacaggataaaatccgatgtcgaaaaattatgcagccctggcgcaacagatagtcgcggcaatcggcggggtcgacaacgtcgccgccgttacccactgcatgacccgtctgcgcttcgtggttaaagacgacgaacaggtcgatagctctaccctgaaagggctggccggggtgctcggcgttgtgcgcagcgataaccagtgccaggtgatcatcggcaacactgtctcccaggcctaccgcgaggtggtgaatctgctgcctggcgacctgcgcccggctgagccgcagggcaaagcgccgctaaccctgaaacgcatcggcgccgggatccttgacgcgctgatcggcaccatgtcgccgctgatcccggcgattatcggcggatcgatggtcaagctgctggcgatgatcctcgagatgagcggcgcgttgccgaaaggctcgccgacgctgaccctgctggcgcttatcggcgacggcgcatttttcttcctgccgctgatggtggccgcctccgcggcggtgaaattcaaaactaatatgtcgctggctatcgccatcgccggggtgctggtgcatcctgggtttatcgaattgatggccaaagccgcccagggagaacacgttgaattcgcctttattccggttaccgcggtgaaatacacctacacggtgatcccggcgctggtgatgacctggtgcctgtcgtatatcgagcgctgggtggatcgcattaccccggcggtgacgaaaaactttctgaagccgatgctgatcgtgttgatcgccgccccgctggcgatcctgctgattggcccgctgggcatctggatcggcagcgccatttccgcgctggtgtatacgatccacagctatctcggctggctgtcggtggcgatcatgggcgggctgtggccgctgttggtgatgaccggtatgcaccgcgtctttacgccgaccatcattcagaccatcgccgaaaccggcaaagagggtatggtgatgccatcggagatcggcgccaacctgtcgctcggcggctcttcgctggcggtagcgtggaaaaccaaaaacccggagctgcgccagacggcgctggccgccgcggcatcggcgattctggccgggatttccgaaccggcgctgtacggcgtggcggtgcgcctgaagcgcccgctgatcgccagcttaatcagcggctttatctgcggcgcggtggcaggtattgccggactggccagccattcgatggcggcgccggggctgtttaccagcgtgcagtttttcgatccggccaatccaatgaccatcgtctgggtgtttggcgtgatggcgctgtcggtggtgctgtcgtttgccctgacgctgatccttggctttgaggacattcccgttgagcaggccgctgccgacgccagagcgcgccaggccagggcccaggcatcccacgcctgaatacactattgataatgaggtaatgcatggcgagtttcccacagggatttttatggggcggcgcactggccgccaaccagtctgaaggcgcttatcttgaaggcggtaaggggctgaccaccgtggatacccttccccacggcgcccatcgcctgccggtaaaattaggcctggagaagcgctttacgctgcgtggagacgaattttaccccagccaccaggcgatcgatttttaccatcgctataaagaagatatcgccctgatggccgagatggggttcagcgtctttcgcacctccatcgcctggagccgcctgttcccacgcggcgacgaacagcagccgaatccgcagggcatcgccttctatcgctcactgttcgaggagtgcaaaaagcacggtatcgagccgctggtcaccctgtgccattttgacgtgccgatgcatctggtgatggagtacggctcctggcgcaaccgcaaaatggtggattttttcagccactacgcccgcacctgctttgaagcttttgacggcctggtgaaatactggctcaccttcaatgaaatcaacatcatgctgcacagcccctactccggcgccggtctggtgtttgaagagggtgaaaaccaggagcaggtgaagtatcaggccgcgcatcacgagctggtggccagcgcgctggcgacgaaaatcgcccatgagattaacccgcaaaatcaggtcggctgtatgctggccggcggtaatttctacccttactcctgcaagccggaagatgtatggatggcgctggagaaggaccgcgaaaacctgttctttatcgatgtccaggcccgcggcgcctatccggtgtgggccgcgcgggtgttccgggaaaaaggggtcacgattgcgaaacagccgggcgatgacgagatcctcaaaaacaccgtcgatttcgtctcctttagctactacgcgtcgcgctgcgcctcggcggagatgaacgccagcaacaccaatgccgccaacatcgtcaagtcgctgaagaacccgcacattccggccagcgaatggggctggggcatcgacccgctgggcctgcgcatcaccatgaacatgatgtacgaccgctatcagaaaccgctgttcctggtggaaaacgggcttggcgcccgcgatgagatcgatgccaatggggacatcaatgacgactatcgcatcagctacctgcgcgagcacatcagggcaatgcgtgacgctatcggcgacggcattccggtgctgggctacaccagctggggctgcatcgatctggtctcggcgtccaccggcgagatgagcaagcgctacggctttgtctatgtcgatcgcgacgatgccggcaacggcaccctggcgcgtaagcgtaaaaagtcattcttctggtaccagaaggtgatagccagtaacggcgccgatctcgactaagcaccctcgcccacgcgcgcccgttccccgcgatagccgggggacgggcgtcggctatctgttgcatccattacatgcttttttctcgagcctgattccagtttctggtttgccacctgtttacaataactggtattttatccagtacttttaccggggtatcttcagcaaggagcacatcatgagcgcacagcaccctaccgcagccagagggatagccagggccattcgccagttaaccgtgggatatgtcagaaaacgccatgaggaccgcaaaacgcgggagacgcggcgctacacccgccacgcggcattaagcttaaacggcgactggctggagcaggcggggtttccggtcggcacgcaggtcagagtctcggtgtcgcccggtaaattagtgatagagaatcttgagctggcagcgccgggaacggggctcccttccggccagtcgtgcgccggcggagagcccggttcgccgcagggctagtcgtccgcggcctccagctgagtaaagccgcccttgcccttccagcctgccaactgctgatacacccgggcaacggcctctttcaccggctgggtcatcggataataaaaaccgacgatatccggctgaatgccgaggaaaatcacctcgccgacgtcttctttcagctgatcgaccagatagttgagcggcatgttatgggtggtcatcataaacatctcggcgatgtcgtcgggatcgatgatgcgaatgtcgccggggtttaggcccatatcggtggcatcgacaatcagcaggcgttcggggcgtaattcgcggatcgccacgatgtcgttttccggcgcgctgccgccgtcgatgaccacccactggccggccgggttcgccgcgcacatctccgccagcagcgggccggcgccgtcgtcgcccatcatgctgttgccgacacagagtaaaacgtcagtcacgtaatctcctcaccatcaggtagatggcgctctcctggtgaatatcatgcagcatgctgagcagggttttgctccacgcctgctgctgcggggtctgcgcggactgcgctttatcaaaggcgttggccagcatcgccacatgactgctgtcgatgacgatttcgccatacttcggcacgccctccattttgcgccgcgcggcgcttccggcctcaagggtggcgatccatgccagatacgcgtcccacgggcagctcagcgccgcctccagacagtcgatgacgccgaggtggtggccaatcgccaggctgtaatagaccacctgctgcgcctgatccggcgtggcgtcgttctcatcaataaatttacggctcagctgactgaacaccaccgtctcgctcatcggatacgcgccccctcgaccacctggttgagatgggtgacgatctcggtcagacgcggatctttctccgcctccagccagcgcagcacctggctgtcgccctggccaagcagacgcatatagtcatcggcaatctgccgtccatagcgatagcccgccagacgccgcgcttcgcgatcgatgcgcacccgcagaggctgcaccatatcggcatgcagcagctcggtcggctgttcgtcgagctcacccggcagacgggcatgaattttctgctccagcaggccaagcgccatggcgaagccgtacagcgtggcggctggcgtcggcgggcagcccggaatatagacgtcgaccggtacgattttatcggtaccgccccagacgcagtacaggtcgtggaagatgccgccgctgttgccgcaggcgccgtaggagatacagatcttcggatccggcgccgactgccaggcgcgcagcgccggggagcgcatcgcgcgagtcactgccccggtaaacaacagaatatcggcatggcgcggcgaaggcaccaccttaatcccgaagcgttcagcgtcgaacagcggcgaaagggtggcgaaaatttcgatttcgcagccgttgcagccgccacagtcgacgcggtagacgtaggccgaacgtttaatcttcttcagtagcgaggccttcatgctggcgatggattcatccaccgtcatcggcacgggaatgccgttttcatcgcgcgggccaagtaaagtgctcatcagctggcctccctcatgtggcgggtcagttcaatacgatcggacggcaccaggcatttctggcgcttgcattccgggcaggtttcgaagctttcgcggtgcagctcggcgcgggtatcgccgttatgcttgagcagcgcgatggcgtagtcgatctccttctgcaccgcgaacggacgctggcactcccggcagtggcagatagcgaagcgcgactgctggaggaaatcctctttcttccacaccgccagctcatactccggcgacagcttaatcgccgccgtcgggcacacctcttcacagcgaccgcagaagatgcagcgcccgagattgaactgccacgccagctggttagtggccagatcgatctcgaccgtcagggcgttcgacgggcaggcgttcacgcaggccgcgcagccgatacactgctgtggcgtatgctccggcttgccgcgaaagtttttgtctaccggcatcggctccagcgggtaggcgtgcgtcgcggtgccggtcttaataacttttttaataaaggtaaacatggcgattccttatttcagcggcgagtttttacgctcgatgctgtagcgctccagctctttgtatggcaccactttgctcttcttcttgcgtacatcgaccacggtcatgcggtcagtacaggagtagcacgggtcgaggctgccgatgatcagcggcgcatcggaaacggtgttgccgcgcagcatatagcgcagggtcggccagttggcgtaagtcgccgcccggcagcgccagcggtacagtttctggttgtcgccggtcatgctccagtggatatcgtcgccgcgcggcgcctcggagaagcccagcgcgaagcggtgcggaatataggtgaacccctccaccatcagcgggccgcccggcaggttatcgagaccgaaatcaatcatattcagcgcggtgtaaacctcgttgatccgcaccttgaggcgagatatcacgtcgcagccctgctcgctgtggacttccatcggcagcaggccgtaaccgacaaacgggtggtcggcgcgggtgtcgcgggcgtggccgctggcgcgcaccatcgggcctacgttgctgaagtcgcgggcgatttccgggtccagacggccaataccgacggtacgctgttccatattcggcgtgctgagcagcatatccaccagctcctgcacgtcgcgacgcatctgctgcgccagctgacgggtctggatcatgtcctctttcagcaggtcgcggcggatcccgccgatcaggttcaggccgtaggttttacgcgcgccggtaaggatctctgccatcttcatcgaggtttcgcgcacgcggaagaactgcataaagccggagtcaaagccggtaaagtggcaggccagaccgaggttcagcaggtgcgagtgcaggcgttccacctccagcagaatggcgcggatcatctgcgcccgctccggcaccacgatgcccatcgcgttctccaccgaggtggtgtaagcggtgctgtgggcgaagccgcagatgccgcacacccggtccgacaggaaggtcacttcgttataacccatgcgggtttccgccagcttttccatcccgcgatggacgtagaacaggcggtagtcggcgtcgataatgttctcgccgtcaacgaacaggcggaagtggccaggttcatcagaggtgacgtgcagcgggccaatcggcaccacgttgtttttcttgctgccgagctcgttaataaactcgtaggtttcggcgtcggtggtcggcgccggacgctggcgataatccatgctgtctttgcgcagcggatagagttcgtccggccagtcgtccggcagcaccagccggcgttcgtccggcaggccgaccggcaccaggccgtacatatcacgcacttcgcgctcgccccataccgccgccgggacgcgcggcgtcaccgacgggtattccggtttgttggcgtccacttccacgcgcacggtgatccagcatttggtgccctgctccatcgacagcacgtaatagaccgcgtagtggccgttgagcttacgttcatcgttgccgaacagcaccgacagccagccgccctgctggtagtagagaaactccaccacttccggcaggtagttgaccttcacggtgatggttaactggtctttggtctgccaggcttcgtccagcaccacgccgggaaaggcctggtgcagcgccgcaaggtagtgttgacctattttttcttcagacatgctcaaactctcttaatcacgccaccagcaaggagacgaaagctaaaaaggcgaaaccaaacccggcccaggtgacgcgggaggtggcacaaaaacgcagacgcgccatgctgttttcaaacagcgcgataattagcaccccaaccaccagcttaacgatggcgaccaccagcgccagcagcaggccgccgacgctgaagctggtcatctggccccacggaaagaagaccccgacaaacatctgcagcaccaccagctgtttgaggctgatgccccacttcaggatgccaaagccgctgccgctgtattccgacagcggcccttcctgcagctcctgctccgcttccgccagatcgaacggcagtttgcccatctcgataaaggtggcgaaggcgcaggcgcataacgccagaatcagtggaatgctgcgcgccgccggccagtggtaaagggtatcggtgatggcgctgatatgggtcgagccggcgacctgcgccgccacccacaggcccaacagcaggatcggctccaccagcacgccgagcatcgcttcgcgactgctgcccagcgcggtaaacgggctgccggtgtccagaccggaaatggcaaagaagaaacgggcgatggcgaacaggtagatcagggtgatgagatcccccagcaccggcagcggggagtctaccgtcaccaccggcagcgcggtggcgatggtcagcatcacgcccaccatgacgtacggcgtcaggcgaaacacccagcccgaggcgtcaggaccgacgatctggcggcccagcagtttcaggatatcgcgatactcctgcagtacccccggtccacggcggttatgcagccgcgcgcgggcgacgcgaacgattccggacaacagcggcgcgacggcaaacagcaccagcgcctgtagcaatgcaattaacagactcattctcaggctcctcgcgaaatgacaatcaccaccagcaccgccagctcaaccagcgcgatcccgcgcagcagcgccggcgccgaggccgattgccagcccggcaccagacgcaccgggttcagccagtgacgcagcttcagcaacggcgcaaaggcctctttcaccggcatggcaaagccgtgggccgttaccaccatcgactgctcgtggtcgtaaccgcagacccacgccgcgccgcgcgagcgcgccgccaggcgatcgcctttaaagaagatcatcagcaggaacggcagcagcgggcaggcgataagcagcagcgcgatcatcggctgcgacaccacgctcgatacctgagcctgcaccgggaaggcgccgctcaccagcggcagcagccacggcgcggcgatgccgccaacgaggcagaacacagccgccagcaccacgctcagggtcatcagccagggggcgcaggtggcgtattccgcctctttcgtccgcggcgcgccgaggaaggtcacgccgtagactttcgccatacacatcaccgccagtgcgccagtgatcgccaggccaacggccagtagcggccccagcaaacggccgataaacaggtcgccagtgctcattttgaagaaggattgatagataacccactcgccggcgaagccgttcagcggcggcagggcagccattgccatcagccccaccagcatggcgagggagatcagcggcatttttttaccgatgccgcccagcttctcgatatcgcgatgaccggtgcggaaccacaccgctccggcaccgaggaacagcgtggttttgaacaggctgtggttaatcaggtgatacatgccgccgataaagcccagcaccatcagcgtgctgttgcgggtcgccacgccggtgacgaaggcgcccagccccagcaggataatgccgatattctccagggtgtgataggccagcaggcgctgaatgttatgctccatcagcgcatacagtccgccgataaaggcggtgatcatccccagcgccagcagcatcacgccccaccacagcggcggcacgccgccggccagcgaaacggtcagcatgccgtacagaccaaccttcattaccaccgtggaaaacagcgcggcggccggcgcgctggccccggcgtgagcctgcggcgcccagccgtgcagcgggatcgccccggccagcagggcgaaccccaccagacccggcagccagagcagcgggttctgcatcatatccaccgcctgaaggttgatctgcgccagctcgagggtgccgtaggttgaccacaccagccagcaggtccaggccatcagcagagtaccgagacgccccagggcaaaccacagcttaccggaggcggcgcagccggtgagaaacgccgcgcagagcgccatgatctccgccatcaccaccagtgaaccgatattggtcaccaccaccgcgcaggtcgcggcggccagcagcaggttgaccagcgggccgttggccttcacctgcgggtggcgatgccagctaatattgaacaatgacaccggcagcgccgacaggccgatggccagcagccacagcgcgttgacgccccccacccgtatcgtcaggtggagaaactgcagcatgccgccgtggatccgctccggcatcagcagcgcggcgccgccggcgaccaccagcatggcgctggccaccgcgccgccgatcccggcaatggcgccgctgagcggtttgcgcatggcaaacagaaaggccagtacggcgctggcggcataccacgccaccgcctgattcactaatccaattacactcattccctctccccctgttgcgcctggaacagcgacaagtcgccaaggtcggtattaaaggtcagctggcgtttacgcttgctggcctgggcgatatcacggctatccaccagcatcagcgcgttggtcggacaggtccgcacgcaggccgggccctggtcatcgaagtggcagaggtcgcatttcacggcaatagcgcgcacgcccggtacccagtcgagcagcgagctgacgcgcgccggcgccggcggcgcggggggcgccagccgggtattggcattcgccgggatatccagcgggcggctgccggaaaattcaatggcgccgaacgggcaggcaatgccgcacagtttgcagcttacgcacaggctctcgttgagctggaccgcgccatcgacgcgctggatggcgttaaccgggcagacggtggcgcagggagcatcttcacagtggtggcacatttgcggtgccgattctttttcattacgcatcacctgcagccgcggcatagcctgcaggccgtgctggcgatgcgtctcagagcaggcggcttcgcaggtgcggcagccgatacagacagtggagtcagcaattacaaaacggttcaccgggtcatcctcgggtgaaagtcatttttgacgaaatcaggttgcgcaggtgtcattttcgacacgtgtcgacaccttacgatcagtgggtcagcgccagatggcttaaatccaccggttggtcttgttccatggcgtcatacagacggtcatagacggtggcgataatcgccagatagtgctccagcacctggtcgcgggagcggttgctgatgcggccgtccaccgtgccatccattgcgagggtggcctgagcaatcagatacttatcaccgccgtttttgttttcgacgtagtactcgatggtgtggctgttgaagccttccgcgagggcgacgaacacctgaaaatggccgaacagcacgaagcacagctctttgtccggcgcgcagctcatcgcgtgatgcaggcgggccttcgacaaggtgatcccctgaaccagcgagttacagtagatgtgccactgctcctgctgctgccggtgacggtcggcgatgtaatccgccttttcacttatttcccaaatagtcatatcggtttctccgtagcatgagatgcaccctctaagcatttttcatgccagattttatttaattgatttaactatgtttttatatcgccctctgccgatacgacatgtcgatgacagccccggggcgtcgacatcgacattgactgccacgacgatttcattctggcatcgttattgcatagaaggcgcatcgcgatacggaggcgactatgcacgaaatcaccctcagccagcgggcgctggaaattattgaacaacaggcgcagcaggccggcgcgcggcgggttaccggcgtgtggctcaaggtcggcgcattttcctgcgtggaagccagcgccctgaccttctgctttgagctggtctgccgcggcacgctggcggaggggtgcgaactgcatatcgccgaacaacaggctgaatgctggtgcgatcgctgtcagcagtacgtccatcttgtctcgcagcacgttcgccgctgcccgcactgcaataacgaccagctgcagatcgtggcggatgatggcttacagattcagcgtttagaattggagtaaattatgtgtacaacatgcggctgtggcgaaggcaacctctatattgaaggagacgaacgaaacccgcattccgcgttccgcagcgcccccttcgcgcccgccccacgccagacgatgaccatcaccggtgtcaaaatcgaccacttcacccccacccgcacgccagagggcgacctgcattacggccacggcgaagcgggtacccacgccccggggcagagccagcggcggatgctggaagtggagatcgacgtgctggataaaaacaaccgcctggcggcacgcaaccgcgcacgcttcgcagcaaaacagcagctggtgctgaatctggtttccagccccggctccggcaaaaccaccctgctcaccgaaaccctcacccggctgaaaggacgcgccgactgcgcggtgattgaaggcgatcagcaaacggtcaatgacgccgcccgcattcgcgccaccggcaccccggcgattcaggtcaataccgggaaaggctgccatctcgacgcccagatgatcgccgacgccgccccgcgcctgccgctggctgaccgcggcattctgtttatcgaaaacgtcggcaacctggtctgcccggccagctttgatctcggcgagcgccataaggtggcggtgctgtcggtcaccgaaggcgaagacaaaccgctgaagtatccgcatatgttcgccgccgccagcctgatgctgctcaacaaagtcgacctgctgccgtatctcaatttcgacgttgagcggtgcctggcctgcgcccgcgaggtcaatccgcatattgaaattattcttgtctccgccaccagcggcgaaggcatggagcagtggcttacctggctggagacgcagcgatgtgcataggcattccgggacaaatttgcgccatcgacggcgtgctggcgaaggtggaagtttgcggtattcagcgcgacgtcgacctgacgctggtcggcgccgttgatgagcagggccagccgcggctcggccagtgggtgctggtgcatgtcggcttcgccatgagcgtcattaatgaagccgaagcccgcgacaccctcgaggcgctgcaaaatatgtttgacgtggagccggacgtcggcgcgctgctgtacggcgaggagcgataatgcgttacgtagatgaataccgcgcccccgaacaggtgatgcagctggtggcccatcttcagcagcgtgctcgtctgctgccgcacaccgccgcgcgaccgctgcgcatcatggaggtctgcggcggccatacccatgccatttttaaattcgggctcgaccaactgttgccggagaacatcgaatttattcatggtcccggctgcccggtgtgcgtcctgccgatggggcgcatcgatgcctgcattgagattgccagccgcccgggagtgatcttctgcaccttcggcgacgccatgcgcgtgccgggtaaaaacggctcgcttctgcaggcgaaagcccgcggcgccgatgtccgcatcgtttactcgccgatggacgctctgcggctggcgcagcaaaatccgcagcgcgaggtggtcttttttggtctcggtttcgaaaccaccatgcccgctaccgccctgaccctgcgtcaggcgcgagagcgcaacgtcgataacttctactttttctgccagcacatcaccctgctgccgaccctgcgcagcctgctggaccagccggagaacggaatcgacgcctttctcgccccgggccacgtcagtatggtgatcggcaccgaggcctacggctttatcgccagcgactatcaccgtcctttagtggtcgccggtttcgaaccgcttgatctactgcaaggcgcggtgatgctggttgagcagacaatagcgcagcgcagcgatgtggaaaatcagtaccgtcgcgtggtgccggatgagggcaacccgctggcgcaggcggcgatggccgacgtcttccgcctggatggcgacagcgaatggcgcggcctgggggtcatcagcgactccggcgtgcagcttacgccagcctatcagcgcttcgatgccgaggcgcattttcgcccggcgccgcagcgcgtgtgcgacgacccgcgcgcccgctgcggcgaggtgctgaccggccgctgtaaaccgcaccagtgcccgctcttcgccagcacctgcaatccgcaaagcgcctttggcgcgctaatggtctcctctgaaggggcctgcgccgcctggtatcaatatcgcagtcaggaaaatgaagtatgaaaagcgtccagttagcccacggtagcgggggacaggcaatgcagcagctgatcggcgacctgtttatgcaggccttcgccaacccctggctggcggagcaggaggatcaggcgcgcctcgatctggcggcgctcgccgcccagggggaccgcctcgccttctccaccgacagctacgtgattgacccgctgttctttcccggcggcaatatcggcaagctggccgtctgcggtaccgccaacgatgtggcggtcagcggcgccatcccgcgctatctttcctgcggctttattctcgaagaggggctggagatggccaccctggaagcggtggtcgccagcatggccgacaccgcccgggcggcagggatcgccatcgtcaccggcgacactaaagtggtgccgcgcggcgcggcggataagctgtttattaacaccgccggcatcggcgccatcccggcggacgttcactgggggacgcagcagattagcgccggtgatgtgctgctggtcagcggcacgctgggggatcatggcgccaccatccttaacctgcgcgagcagatggggctggacggcgcgctgtccagcgactgcgcggtgctgacgccgcttatccagaccctgcgcccgctgagcggagtgaaagccctgcgcgacgccacccgcggcggggttaacgcggtcgcccatgagttcgccgccgccagcggctgcggcatcgaactgcaggaggcaacgctgccggtcaacgacacggtgcgcggcgtctgcgagctgcttggtctggacgccctgaacttcgccaatgaaggcaagctggtgctcgccgtcgcccgcgacgaggcggaaaacgtgctggcgcatttgcggtctcacgcgttaggacgcgatgcggcgataatcggcgaagtggtcgcccgcccgggcgtacgttccgttgggctgtacggcgtgaagcggacgctcgatcttccccacgccgaaccgctgccgagaatttgttaacgacggcgtcgggtcccggatagcggctggcgccttatccgggctacaaaactgcgcgcacatgtagcccggctaagcgcagcgcgagccgggaaaaagccagcgtaattattttgcccaaaccagcgggcgcccatggatgggttaaagcggcaataaccgctttattaacatactattatttgtaccatcattttcttatgcgccgcgttgtcggcgcgttttggacgtaagcaatgtcgtatacaccgatgagcgatctcggccagcaggggctgttcgatatcacccagcttttattacagcagcccgacctggccgcgctaagcgaaaccctgacccgtctggtgcaacagtccgcgctggccgatgaggcggccatcatcctgtggaacgcgggtaatcaccgcgcggccaggtacgcctgcgatgaggccggccatccggtaagctacgaggatgaaaccgtcctggcccacggtccggtgcgtcgcttactctcccggccggatgccctgcattgcgatcatgaaacctttgccgatacctggccgcagcttatccgcagcggactgtatcatccgttcggttactactcgctgctgccgctggcggcggacgggcggatcttcggcggttgcgaattcctccgccgtgacaaccggccgtggagcgagaaagagttccagcggctgcataccttcgcgcagatcgtcgccgtcgtcaccgaacagattcagaaccgggtcagcaataacgtcgattacgatctgctgtgccacgagcgcgacaactttcgcatcctggtggcgatcaccaacgcggtgctctcgcgactggatatcgacgagctggtcagcgaggtggcgaaagagatccatcgctacttccggatcgacgccatcagcgtggtgctgcgcagcgaccgcaaggggaagctcaacatctattccacgcattatcttgacgccagccacccggttcacgaccagagcgaggtggatgaagccggcaccctcaccgagcgcgtgttcaaaagcaaagagatgctgctgcttaatctgcacgaacatgacactctcgcgccgtatgagaaaatgctcttcgagatgtggggcaataagatccagaccctgtgcctgctgccgctgatgtccggcaataccctgctcggggtgcttaagctggcgcagtgcgacgaacaggtcttcaccaccaccaatctcaagctgctgcggcagatcgccgagcgggtgtcgatcgctatcgataacgccctcgcctaccgcgaaattcagcgcctgaaagagcggctggtggatgagaacctcgccctcaccgagcagctcaataatgtcgagagcgaattcggggagattatcggccgcagcgaggcgatgaacaatgtgctcaagcaggtagagatggtggcgcagagcgacagcaccgtgctgatcctcggcgaaaccggcaccggcaaagagcttatcgcccgcgctatccacaacctcagcggacgcaacggtcggcggatggtgaagatgaactgcgcggcgatgcccgccgggctgctggagagcgatctgttcggccacgaacgcggcgcgttcaccggggccagcgcccagcgtatcggccgcttcgaactggcggacaaaagctccctgttcctcgatgaagtgggcgatatgccgctggaactgcagcccaaactgctgcgcgtcctccaggagcaggagttcgaacgtctggggagcaataagctgattcagaccgacgttcgattgatcgccgccaccaaccgcgatctcaagcagatggttatcgacagggaattccgtagcgatctctactaccggctcaacgtgttcccgatccatctgccgccgctgcgtgaacgtcccgacgatatcccgctgctggtgaaggcgtttacctttaaaatcgcccgccgcatggggcgcaatatcgacagcattccggcggaaaccctgcgcactctgacgcgtatggagtggccgggcaacgtgcgcgagctggaaaacgttatcgaacgggcggtattgctcacccgcggcaacgtactgcagctctccctgccggagcgggatatcgtggaagccccgcggacgccggcggtcctgcctgaggaaggtgaggatgaatatcagctgatcgtccgggtgctgaaggagagcaacggcgtggtggccgggccgaaaggcgccgcccagcggctggggctcaagcgcaccacgctcctgtcacgcatgaagcggctgggtattaataaagacgaactggtgtaacctcgcgcgctccccctttccgcgccggtgagagggagcgctggcgcagcgcgctatttatcgctggtaaaaccgttgctggtcgccagttcggcaaaccacagcgcattgcgttttatctgtcgctcgccggtctccagatccagtcgccagaagccgtagcgccgtttgaaggcattgatccacgaccagttgtcgataaacgtccactggtgcacgccaaagcagttcgcgccgtcggctatcgcccgatgcaactgcaccagatgctcctccatcagctggatgcggaaagtatcgtctatcaccccgtccgccccgggctcgccctctgattgtcgatccatcgcgatgccgatttccgcgagataccacttaatattgccgtagttatcgcgaatattggcggcaatgtcatagatcgcctgcggcaggatctcgttgttatcacgataaggattaaagcggccctgcgggttcaccgcgttttcgaaatagtattccggggtgaaataatcgaggtcatattcgctctcacgcgcttttacccgccgcggcacgtaatagtttaccccaagaaaatcgatatccgcgctgaggatcaacgccgcgtcgtctttgctggtcgtcggcaggcagtcgtgggcggcaaggatctcgcacagcgctttggggaattcatgttttaccagcgggtcaaggaagctgcggttaaaaaacaggtcggcatacccggcggcttttttatccgcgtcgctgtcggtgagggtatagctcggggtcaggttgagcaccacgccgatctcgcccgccagcgccagttcacgataagccgttaccgctttggcgtgcgccagcataatgttaaacgccacctgcgccgccagccggccatctttcttacatggatagtggaagtcgtacaggtagcctccctcaaccggcacaatcggctcgttgaaggttatccagtatttaaccttatggccaaacaggctaaaggcggtgcgggcaaagcgggcaaacagctcggctacgtgcgccgattcaaagccgccgtactgtttctgcagcgcttccggcatatcaaagtggtagagattgatcatcggctcaatgccgttagcgatcatctcatccagataggcgtgataaaaacgcaccgcgtccgggtccggcgcgccggtttccaaatcagcgatcagtcgtgaccactgtatcgaggtacgaaatgagttgaagccggtctgtttcatcagcgctacgtcctgcggatactgatgataagtatcacacacggtctgcggccctacctgctgataaaatcgctccggctgttcggcaaaccaactgtcccaaatggaacgatggcgcttattggtgaccccttccgtttgcgggccggacgccgccgccccccacaggaacccttgcggaaactgatactgctgcataacctctccttcgaaaaaaggctgcgcccgtctggcgcagcctgaacgtactactcagcgaccacttcgatcgatttaatgaacatatagccccagtcgccggcgaagcggccgaagtcaatctgattgctcccggctttaagcgtcaccggtatccgcaactgctggccctgctcatccgtctgcgggaaggccaccgcctgcggagcgaccccgttgacgacaaacgagttctgcttaccgccccatttgccgttgaaggttacattgagcaggaactgaccgctccacggcgcctgcacctgccagctgaccttatccccctcgttggcaaatgggccgaggaagccgtcctcaccaactgtcagcgcgtctttatcactcttcatcaccgtcagccgcccctcagccacgccataaacttcgccgtgataacgacaaaaatccgctggcgctttccccgtcgcctcgcccaccgtcacggtcacggttttgctgcttttcaacagcccatcgtccgccgtgaacgtcagcgcataggtgcctggcgccgtaaaccaggcccgggtttgagcccgatcggcatggcagaaatgcacctggccatcgccggcgtgctgccagcccaccttaacctctcgcgacggcaggccatcgtcctgccagttggccgtaagctcgacgccctggtcctgcgtggtggttagggccggttccagcgtgacaaccggcggctgattctcctcgctatgctgcacgctaatcacattggaaggggccgaacgaccgctctcgtttttcgccgtcacccggtagtaatacgtgtgcccgagctgaagctgacgataatcgtcgcggaacagaaccatggtttccggattccattcgttaacgccatcggagatatcccggcccaccaccgtccacggcccggtcggtgaggcggcgcgttcgacatcgtagctgcgtcccaccgcagcgcccatccagttgatcgcgaagggcgaggtggtttcgcgcagcaaaggcgcctccggcttcggtagcggcgccatcgtctgctgcccggccatctgcgccgcggcggtgcgcaccagatcgaccaccgcctgctcctggttcgcttcgccttctttggcaaaccccggcaggtggtagctatagtgctcggtcgactccttatgccagtagaagccgccgtcgtgacgatggccgcggaagccccagataagcccgccggcggcttgcgccccgttgacctcgctgtgaacaatcgactgcataatggcgttcagttgatccgccggcagcaggccaaactcgccgacgagatagactttttgtccgccgacggcgcgcagatcctgcgtcacctgcccgggatggttattatcggcattggtgtaatagtgattgctgacgatatccacattggggtcggtcaacgcaaacggattaattttcttataggtgccatccaccaccagctgatgaggggcccactttttaatccacgccgcggtctgatgcaggaaatcggcgttggtatcctccagctcgttaccggtttcccaggccatgatcgccttttcatcataataggcgcggccggtgacggtatttgtccgggtgatgacctggcggatcacatccagataggctttgaaggtcttgctatcggtccgataaaagtcttccgctttttcatgatagaacgccgccagctgctcgcgcccgccccaccaccaccagtggtcgataaacggcaggatcagacgcaatccctgtttatccgcttcggcaatcatgttgtcatacacccgcatggctttctcattcagccgcggcatgccgtccgccgtttccggcgccagaatatgggtctcgcgcccgcaggccttatcaaattcctgctgcaccgacagcacgtagacgcgctgggctttcgccccggtttgcaccatcgcctggatccagttttgctgctcctgggccgttggccatttaaagtattgcccccagccgcgcgggtctgccctgcaggggccgcgggcgtcgtcttcaatgcggtgcagctccggcgcgtggatcccggcgaaacgaaacaccttgtcgccgtccttgagggtggcgccgtcgcgagtgataaagtgcgtaaagtgcgagcgctcggcggccagcgccccgccggccgccagcgcggacagcagccccatcagcagcaggtttttcatcggcttcatcgttctctctccttagaaccagacctcggcctgtacgccgaagttaacggtgtcggtagagccactgcgggaatacccgccggcggtgatggtattggtatcccagttgtagttaccgtctaatgcatcggagacacctttatcccacttcgcgtaggtgacgaagaagcgcagctgcggacgcgcccagaaaccggagtcaaaggtcagcgttggcgcaacggtgactttggtcaggccgcctttgcctttgccgtttactcctttgtagtttttgtcatccaggtattcgtagcccagctcgtactgcatggcaaagttgcgggtgatctgatgataagggcggataccagcgacccacatcgagcgtccccagccattttcatcttctgtccaccagcggtagtttttatctttctgccagaaagcgaaggtcgagatctccaggtcgcccatcgaggccacgctatccagcaccactcgccaggactgggtgttttccaggttggcccagccccagccgtttttacccagcgagtcacccgccgccagccctttcccgtactgcaatgcgaggcgggagtatcctccggtcagaccatagaagccgtcaaagttataaataccggtcacgccatagcccttctcggcggaagttggatggttttcgttacggttcatgtggtggccgatcagctccagatcgaagcctgtccccgcgatctttttcagccacaggttgagagaatagtcatccgggtagccctgatctcccttatccaccgggtaggctttggtttcatcggtgggtgaaaaggcgtacaccccggcgtcgaagcgggcgaagccgagatccatgttgtcgaagccgccgccggtgccgttgtactgaatgtactcccagtcgaactgatggctggaggtgttggagctgctgtagcgcttaccggcccagaaggtcatctccggcgcaaaatccagattgctcagctcggcgaacccttcacgaaactgtacgtcatggccatcgtcatcctgacagttccagtcggaggtgcatttcgactggtgagtgaggttggcctgcactttcgccaccacgccgctgtccgccgtcagcgtcacggtggggatcagttcgatcttggtgtcttcttcgttgcccagtcgccacttaccgtccggcatcaggccgacggagtccgcgcggttgccatcggagttcgccaggatcccggagcggatatagccatgcagcgcaaaatcatacttcggatcggcgcaggccgggctgctggcccctgccagcgagaggagagccagaggtattgagtgtttcagctttatcattatttttttcccacgttatgtttgttaacacgaaccgataacggaggggaaatttacggatcaaaaacggaaatgtacatccacttacggaaagcgctttccataattgcctatctggttcacaaaattagctctgcggcgaatatattcgtgagactgatcacataaaatgacaagaatgccgccgggcgctggcagtggagcggaaggaggaggagatgagcaggtgccgccgggggataagccgccgacggcgagaggatcagcgttcggtttccgcgagctgacgttcgtacactttgaagaaggggcgatagagcatccaggcgttaaacatcgcgaacaggctcatgcacaaatttttccagctgccgttcgccgaccatgccgcccccagcggggaaggcatcgaccatggcagcatcgccaccgcgcggtcgaggatacccagctgagttaaataccatgcgatacaggcatttatcagcggaacaaagagaaacggcagtaaaaaaaccgggttcatgatcaccggaaaaccaaacagtatcggctcgttgatattaaacagcgacggcagcaggccaatcttggccacgcttttcagctgccgcgagcggctgcgcatcgccatcagcaccagaggcaaagtggagccaataccgccgatcagcaggtaaaaatcccagaacccctgcagataaatatgcggcagcgttggcgaacccgccgccagcgcctgctgattttcaaacagataggtcatccagaaggggttcatgatcccggtgatgatcagcgcgccgtggataccgataaaccagagtaagttacagataaataaagagataagtaccgccatcagcgtgtcggacgccagcaccagcggccgcaccgcttcgctgatcaactccggtacgatgcgtccggtggtctgcagcagtatggcattcatcacgcttatcgacagcatcaccaccagcagcgggatcagcagttgaaagccattgcgggtcatcagcggcacttcatcaggcaagcgaatacaccagccttttttgtaaaaaaagcgaattatctcaatggaataggtgctggatatcagggcggtaaatatccccataccgccgagataaacattgctcaccgcagtctcgcgaaagccgataaacagcagaaaagccagacacccggttaaaccgcagagccgttccggcagacggtactgcttggcgagactggcgctggcgccgaaggcaacaatcagcgccaccaggccaatggttagctgaaaggtcggcagcaggataggccgcagcagcaaatagacctggccgaaacgcgaggcgccgtcgatggaaacgggcggaaacaaaatgggaactaacaggctgccaacaatcacaaagggcatagccagcgcaaagctatcgcgcatcgccgtaatgtggttgttgcgcgtcagaacgttcgccagcggcgccagccgctgctcgatgatgtccacggccacattcattaactgaatgttcatactcctacctttgcgaatggttgtctcgccgggatgatcgcccacaacaccggaaagtgaaagcctgccataggtgatcatggtcacaattaataaatccacaaacggaaagcgctttccgtaatgcatccattttgactatagtccgctcatccaacctcatcaggagcggtaattatgaaaaaaattatgttgtgttgttcagcaggcatgtccaccagcctgctgatgaaaaaaatgattgcggaagccgaacagcggggcctgccggtagagatcaacgcctatggcgtagcggagttcgccgaacaggttggccattatcaggtggtgctgctggggccgcaggtgaaatacatgcagcaggacctgcaaaaacaggcggataaatacggtatccgcgtcgaacccatcaatatgatggactacggcatgcaaaaaggcgccgcggtccttgatttcgccctttcccttatcgaaaacaagaactaaggaaagatcatgagctctctgtacgctaaactgatcgacgtgatcgaacggcagatcacgcctatggccggcgcgatcggccagcaaaaatatgtcacctcgatccgcgatggctttatcactgccctgccctttatgatcgtcggctcgttcctgttggtgtttatcttcccgccgttttctccggatacgacgtgggggtttgcccgcgcctggctgcaattttcgctcgatcatcgcgatgcgctgatgctgccgttcaacttcagcatgggggtgatgaccctgtttatcgccgtcgggatcgccgccagcctcgccaaacaccatcatctggactcgctgaccgccgggatgctgtcgctgatgtcgtttctgctggtagccgcgccgctgaaagatggccagatctctactgcctacttctccggtcaggggatctttaccgccattctggtggccatctattccaccgagctgtacgccttcctcaaacggcataacatcaccattcgcctgccgccggaagtgcctgccggggtggcgcgctcgtttgaaatcctgatcccggtgctggcgatcattctgacgctgcatccgctgaacctgtttatcgaagcccagctggggatgatcattccggaagcgatcatgtcgctggtgaagccgctggtcgcggcttccgatacgctgccggcgatcctgctgtcggtgctggtctgtcaggtgctgtggttcgccgggatccacggcgcgctgatcgtcaccgggatcatgaacccgttctggatggccaacctgtcggtcaatcaggcggccatggccgctggcaccgctatcccgcacatctatgtccagggcttctgggatcactatctgctgatcggcggcgtcggctccaccctgccgctggcgctgatgctgctgcgcagcaaggccgtgcatctgcggacgatcggccggatgggggtcgtgccgggcgtatttaacatcaacgaaccgatcctcttcggcgcgccaatcatcatgaacccgctatttttcctgccgttcgtgctggtgccgatggtgaacgcgaccctggcgtacttcgcgctgaagctggacctggtcagccgcgtagtgtcgatgacgccatggacaacgccggcgcctatcggcgcctcgtgggcggcgaactggagctttagcccggtgatcctgtgcctcatttgtatggccaccgccatggtgatgtacctgccatttctcaaagcttacgaaaaacagctgctggcccaggagcgtgaaaacgccgtcggccaggctgacaacgcggcgcagaccgcttaacgctaacgattcagaggataatcatggaattagaagaacaggtgatggggattatcatcaatgccggccagtcacgtagcctgtgctacgaagcgctgcacgccgctaaagcgggtgatttcgccaccgccgacgccaaaatgcaggaagcggcgcactattcccgcgaagctcaccttgtacagacccagcttatcgaagctgacgaaggcgagggaaaaaccaaaatgacgctggtaatggtccatgctcaggatcacctgatgacatccattctggcgaaagagctgattgccgaactgattgcgatttaccgcgcgcagccgcttcacgcctagcgccttgcccggccagacgcgctggccgggcctgattccccgaggtcactatgttacatcttggaatagatattggcggcaccaaaatggaagccgtactgctggacccggcgggcgaatgcgtccagcgcctgcgccggccgacccacaaagagagctatgacgcctttatgcgtcagctgctgaccctgattgccgatattcgcgcggtcagcccgcagccgttcaccctggggatcggcctgccaggggctatcgatccgcaaagcggacgcattaaaaactgcaactgcctggtgctcaacggtcacgatctgcgccgggatatcatgcagcagcttggccagccggtgtggatggcaaacgatgccgactgcttcaccctttcggaggcggtggatggcgccggcgccggagctaccaccgtcttcggggtgattatcggtaccggctgcggcggcgggatcgccgttcatcaacagctgctcagcggccccaacgctatcgccggggagtgggggcataatccgctgccgggctatactcctgagcgcgatggcccgccgcagccctgctactgcggcaaaacgaactgcatcgaaagctttctctccggtaccggcttcgcccgccgctatggggaacaagcccgtgcggaagccattgtcgccgcggcgcaaaacggcgatccgcgcgcgctggcccactggcgacactttatcgatgcctttgcccgcagcctggcgtcggtgatcaatattctcgacccgcaggtgattgtgctgggcggcggtctgtccaacgtcagccagatctatcgcgatctgcctgccgccatcgtgccgtggatcttctccgacacctgccgcacgcagatcaaaccggcccgtttcggcgacgccagcggcgtgcgcggcgcggcctggctgccccggcttcccggcgccgcgcaagggccgcggtagacacttttttcagcaggtatgttaagctaggcgaaaatgttcagacagaaaaagccatgccaacgattgatgatgtttcaagattagcgaatgtctcaagagcgacggtatcccgcgtgctgaccggcacccggggcgtgcgcgaagagagccgggaagctgtgctgcgggccgttgaagaactcaactatcgcccgagctttgccgcgcaaaacctcgccagtcagacatccagccacgttggtctggtgatttccgcgcaggacgaaagccacggcgcacgtctgctgccgctgctctctcaggcgctgaaagggctgaataaaagcctgctggtccagtacgtcagcgacccggtagagcaggcggcggtaatcgacgatctgcagcgccagtgcgtggcggtggtggtgctgggcgccgttgccgccgacgcgccgcgcaacgttatcgcctttgaccgcttcggcgtcgccgggagcaacagccagggctatgacttcgcctttgccaccgaaagcgcctgccgctatgtgattggcaagggacaccgcaacatcgccctgctggtggacagcgatagcgacgatgccagccgtcagatgctggaaggctaccgcaacgtcctgcagaactactccattccttttaaccgtcagctggtgctgacggccaacgatgacgtcgagcaggcgctgctgaccttaattaacagcttcagtaaatactcagtcattatcgttaaacgcgaccgctacgcggctgaggcgatgcgtctgctgcgcgaattcaccatcgccgtcccgcaggaggtctccctgctgagccttgaggattccccgctcgcctcgctgctctacccgccgctgacctgcatctcctggccactggaggcgctgctggataactgtattcagcgtattcgcagcctgattgacgaccggccaaccttcaccgccgagggccgctcgctggctggccgcctgatcccgcgccagtcggtcgccgatatctcttgatcttcgcccggttggcgccgggccagacttacctccccttttcgcgctttcgtttccgggctcattattacccacgcatgtaaataagaattattttcatttataaatagcttgtgctatataacatagcaatggctataaacgctgggaaattaaccacaccattgcgagggatcctatgctacacctgacaccgctgaaatcattgctgctggccagcgcgctggctctgctggccgcgacgccggcctcggcgcaggagaaattcagggttatcaccaccttcacggttatcgccgatatggcgcagaacgtggccggcgacgccgccgtcgtcagctccattactaaaccgggcgcggagatccatgattaccagcccacgcccggcgatatcaaacgcgcgcagggggcgcagctgatcctcagcaatgggcttaatctcgaacggtggtttgcccgtttttatcagcacttacagggcgttccggaggtggtggtcagcgaggggatccagccgatgggcatcagcgcgggcccctatagcgggaagcccaatccccatgcctggatgtcggcagataacgccctgatctatgtcgataacattcgcgatgcgctggtgaagtacgatccgcctcacgccgacacctatcgccgtaacgccgaggcctacaaagagaagatccgtcagacgatggcgccgctgcaggccagactggcgcagctgccggcggataagcgctggctggtcaccagcgagggagccttctcctatctggcccgcgactatggcctgcgcgaactgtatctgtggccgatcaatgccgaccagcagggcaccccgcaacaggtgcgcaaggttatcgacaccatgaagaaagaacgcatcccgaccatcttcagcgaaagcaccatctccgataaaccggcgcgtcaggtggcgcgggaagccggggcccactacggcggcgtgctgtatgtcgattcgctgagcgccgccgacggcccggtgccgacctggctcgacctgctgcgcgtcaccaccgaaaccatcgtcaacggtatccaggacgggatgaggaagcagccatgaatgcagcgcaagcgggactgtatgtcgaccagctcaccgtcacctggcgcaacggccacactgccctgcgcgacgcctcgttcagcgtgccgcgcggctccattgccgcgctggtgggggttaacggctcgggtaaatccacgctgtttaaagcgctgatgggctttgtccgcgttggtcacggcgagatcgccatactcggccagccggtcaaccgcgcactgcgccaaaacctggtcgcctatgtcccgcagtcggaagaggtggactggtccttcccggtgctggtggaggatgtggtgatgatgggccgctacggccatatgggctggctgcggcgggcaaagccgcgcgatcgcgagattgtcgatgccgcgctggcccgcgtgggcatgagcgagttccgccatcggcagattggcgagctctccggcgggcagaaaaagcgcgtctttctggcccgcgccatcgctcagcagggtcaggtgatcctgctggatgaacctttcaccggcgtcgatgtgcagaccgaagcgcggatcatcagcctgctgcgcgagctccgcgatgagggctgtaccatgctggtctccacccataacctcgggtcagtgagtgaattttgtgattatacggtgatggtgaaaggcaccgtgctggccagcggcccgacagaaaccaccttcactgccgagaatctggagcgggctttcagcggcgtgctgcgccacgtcgcgctgaccggcgcggaagcgcaaattatcaccgatgacgagcggccgtttatcagccggcgcgcggcgggaggcccacgatgagctggctgctggagccgtttggctattactatatgctcaatgcgatgtgggtgtcggcgctggtgggcggcgtctgcgcctttctctcctgctacctgatgctcaaaggctggtcgctgattggcgacgccctctcccactcgattgtacccggcgtcgccggggcctatatgctcggcctgcccttcgcgctcggcgcgtttctctccggcggcctggcggcgggcagcatgctgtttttgcaacagcgctcgcggctaaaagaggatgccattatcgggctgatcttctcctccttcttcgggatcgggctgtttatggtgtcgctgaatccgacgtcggtgaatatccagaccatcatcctcggcaatattctggccatcgccccggaggatattatccagctggcggcgatcggctttatctcaatggcgattctgctgctgaagtggaaagacctgatggtgaccttctttgatgaacaccacgcccgctcgattggcctgaacacccgcggcctgaagctgctgttctttaccctgctggccgcctgcaccgtggcggcgctgcagaccgtcggcgcctttctggtcatctgcctggtggtcactcccggggccaccgcgtggctgttaaccgatcgcttcccgcgcctgctggccatcgccgtggctatcggcagcctgaccagtttcttcggcgcctggctcagctactatctcgacggcgccaccggcggcattatcgtggtcgcgcaaacgctgctgttcctcatcacctttatcttcgcgccgaagcacggcctgctggccagccgccgccgcgccagggaggccgcatgctgaacctgttcctggccccgttccagtttccttttatggtcaatgcgatagcgatatcgatcgtcgtcgccattccctgcgcgctgctgtcggtgtttctggtgctcaaaggctgggcgctgatgggcgacgccatgagccacgcggtctttccgggcgtggtgctggcctacattatcggcatccccttcgccatcggcgcgtttatcgccggtctgctgtgcgccgtgacgaccggttttctcgacgataacagccgactcaagcgcgataccatcatggggattgtcttctccggcatgtttggcgccggactggtgctgtacgtagcgatccagtccgatgttcatctcgaccatattctgttcggcgatatgctgggaatatccctccgcgatattgggcaaacgacggcgatcgcgctggtgattgcgttgattatcggtctcaaatggcgggattttttgctgcacgccttcgatccaacgcaggctaaagccagcggcctgcgcggcggactgctgcactacggcctgctgtgcatgatcgccctgaccatcgtcgcgacgctgcagtcggtggggattattctgtcgatttcgctgctgattgcccccggggcgatcgcgcttctgctggtgagacgctttatccacgccctgctgctggcggtagcggtggccatcggctgctcggcgggaggggtgtggctggcgttttatctcgacagcgcgccagcgccgactatcgtggtgctgtttaccgcgctgtttgtggtcgcctttgtcgcaagcacgatccgcgatagtcagaaacagaaaacttcagcaattatccccggtggcggctaacgccttgccggggctacaagagcacgacttgtcgcccggctgcgcagcgctgaccagggaaagccgctattttttcggtcgatatttttccggcagcggcggcaccgggcgcctgtcgtccagcagatggcgaatagtgaggatcgggtggcgccagagcatccgcggcccggcccagcgcataatctgcttcatctcctcgcgcttcgccggctggtagcagtgcaccggacactgcttgcaggccggtttattctcgccaaacacgcacttatcaaggcgcttgtcagcgtaggcgttcagcgcctgatagtgcgcatcatcggcctgcgcctcgggactgcgccgctggtagagggcaatcatccgctgaatcgtcattttttcccgttcgatacgcttccccatctccccgcctttcgtctgctcttaaggtgcatttatcatacaccttaatatccatacccgaccagactcactgcttcagatgctgaatcaactgcagggctgccccggacagaaccccgaaatggctgtaggcatagaaatcccggataaaaacgctgccctcgagctcaaacgggcgcagcaggccaagcgcttcttcgtgtcggtaaaccggggccggcatcgacgttaacagatcgctctcgcacagaaaggccttaatggccgaggatgaggcgcactcaataaccggctgcggacagggcaactgccgggcgcgaaagatatcagccaggatgttcattggcgtactagacggcggcggcatgatccacggatagtccaacatcgcctccagggtgacgtccgccgcctgatgcagcgggtggtgctgcctggcgacgatgcagatccggtcctgccagttaattttgccccgcaccacgattttctcatcatgcggtaagggaccgcagagggcgatatcgatgtcgtgcatcagcaacagcttatacagctcggagtcaatgcggtcgacgatccgcagatggatctggggatggcgctgatggaaagccgccagcttatcgatgaaatggctggtcagcagactggaaacgcagccaatccgcagaatgcctttcccggcgccacggatgagctcaatttcctcgcgcgccttttgttcggtattcagcatcgtcagcgcgtagggtaaaaaggcgctgccatattcgctcaacgccatgccgtgcttatgtcgttcgaataaggatgcgctcaggtccgcttccaggctcaatagcagtcggctcagtcccgactgggtgatccccattttctctgcggccagggtcatattgccttcgcgggcgacggtaataaatgcctgaatctgcttaaatttcattggcatgatatttactcattgaataaacggtttttgcatttcccctgcgcccttttttagcgaataaatatcgctatcaatacgctcaaaaatcaccggaacgcatacttcaaaagggtttatttatctcaccacccacggcaaaacacatttctgaaccgaagataatttataatgagaatatatcaccatgacacagaacaatattctattaatttcaggcgctatattaccggtcatcattaccgtcatcatcggctatattagcggtaaacgaaaagactttaactggcagcaggcgggagacatcaataaaattgtgatgctctacgcattgccgctaagtattttcagcaatatggtgatgacgccgcgacacatcgtcatgaccatgggcccggtcgccgtggctatcatcctggcgctgattctcagcttcgtcattcccttactggtcgcccgctatctgtttcgacgcgacctcgccctcagtacgctgcaggcgttggccatcggctcgccggcagtcccgtttatcggcacctcagtgctggcctttttatttggcaccgtcagcgcgtcgctgatcaccgtgtccagcatcacgcaaaacgtcttccagctgccgctggtgatgatactgatgtcggtcgccaccggcgataagagccagcatatttcctttggcgcacgggtggtgaacgccattaaacaacccgtggtctggtcgccggtaatcgccctgatcatcgtgctggcggatatccatattccgcagactatctcgatgtcgctgggtctgctgggcaaagcctctggcgggctggcgctgtttgccgccgggatcgtgctctatacgcgcagcattgttatcaccaccgctaccattatcaccgttatcgcccgcaatattctggtccccggcgcctgctatctcattttattaaaaatgggcttcagcatggagcaaataaaggaagtcgtattgacgatggctatcccggtaggctccatcgcgataattattgctatgcagtataaaaccggcgagcaggaaatggcctcgacgatggcgctgagtattattgcctccatcattacgatgggcggatttattttcttaaccttttaattaccgcgattacaccgcgtgaatacggagagaatatggcctctatcacattatcggctgctgaattgttactgcatcggctgcaggcgctggacgtggcgtatatttttatcaactcgggcaccgattatcctccagtcattgaagcctgggcaaaggcccgggcgaccgggcaaaaggtaccggagttagtgatctgcccgcatgaaaacgccgccatcggcatggcccatggctattacctcggcaccggcaaggtgcaggcggtgatggttcacaccaacgtcgggctagccaacgccgcctgcggcgtcatcaatctggcgaacagcaatatcccggtgctgatttttggcggccgcacgccgataagcgaacattcccacttcggctgccgcaatacgccgattggctacggccaggagatgcgcgaccaggcggcgctgatccgtgaatccgtgaagtgggattttgaactgcggctggccgatcagatcggcgagcatgttgaccgggcctgggcgattgccagctccctgccgaaagggccggtctacctgagcttaccgcgtgagccactgtgcgaaacctttgccgtcgatgaggccgcgctgcaggctggcccttcgcagcagccggtccgctatgcgccagtccgggaagatatcgcccgcgcagccgaggcaatcgcctgcgccagacacccggtcatcttcgcccagcgcggcgcccgaacggcggaaggctttgcgcgcctcgatagtctggtgcgcgaatgggcgatccctctggtggaatactggggcaccgaggttaccctgagcgccgataatcccctgctcgccggggctgatcccagcgtctggctcgctgacgccgatgtgattctggtggtcgactcgcaggcaccatggatgatcgccgagggcgactgtcgccaggactgcaccgtgatccagatggggcccgatccgctcttctcccgctacccggtgcgcggctatcgcgcggacatcaacctggcgggcgagaccgatgaagtcttcagcctgctggaagaggcgctgcgcccgctgcaggccgcccgccagcagcatgtggcggagcgggcggcatatacgcagagccgcatccagcaacagaaaaaccagcgcgacgcgcttctccatgccagccagaccggggccattaccaaaccctggctcagctactgcctcggccatctggctaatcaacaccgcggccggatcgtttctgaactgaccacgctgccgcagtttgccggactgacccaagccgagagctattaccaggaagcgctggccggcggcctgggcgaagccctgcccatcgcgctggggctgcagcttgcgcgccgggaagaactgattattgccgccgtcggcgacgggtcgtacctgttcgccaaccctgcggtctgccaccatattgcggaggtaatgaagctccctgtcctcgtcgtggtcggaaataacggcgggtggggcgccgtcgcgggcggcaccaaagcgctctacccggatggctacgcggcccgcgcggaaaccattccagccaccgcctttaccacctcgccggatttcgccgcgatcgccgcctccagccgcgcggcggccctgtcggtttcccgggccgaagatctccccggcgtgctggaagaagcggtatccctcatacgcacccgccgacaaagcgtgctggttgacgtgcagttagcccgctaacggtttatcctccgggcgcttgtcgtccggagggggttgtcaccccttctggtcacctttatccacatggcccagcggcttctccgggaagcagacatcgcgcacccggcgtttcagctcggccgcatccggaaaaccgccatcctgcttgcgctcccagatctgctgaccgtcgacatcgatcgtgaagatcccgccggtccccggcaccagcgtcaccgaggcgatgtcggtgctgaaggtatgtaacagctcctgcgccatccagctggcgcgcagcatccagttgcactgggaacagtaggtgatggtgatggccgcttttgagttcatcgtcgtctcgctaagtctgaaagggcaaattgtaaacaaagtgcagtttaaatgaagaacacatgattattttgttgcaaacgataatacctatcattaccattcgcaatcaacaaatggagtaagaccctatccgcaacggaaaagacggagcaacctgcaactctggaagtaacgcgtgagccgatactaataacgatcaaggcgtggcgactatgtacaaatcgactccgtcagcagcatggtgtaaaaaacgcctgctggtgacctctttgtttgcagcaatttatcagacttctgccatcgcagcagatacttccgccgttagcggcgaggcggtggatgacacctcggaacaaatgaccgtcaccgcccccgcgccggtgcagaaagccggtagcgaacacagcatcagcgcccgggagctggagaataaaggcgctaacgatttcggctcaatcatgcgctatgagccgctcatcagcgccaccgggggcagcggcggctccggcaacggcaaaagcggcttcgaccgcggaggttacaccggctacaacattcgcggtatggagagcaaccgcgtcggtatcgacgtggacggtatcgcgcaacccaacgccaccggccgcggctacgtcggccgcgccgggctcaacaccttcggcatcggccgcgattatatcgacccgtatatgtacggcagcgtggatatccagtccggcgccacctcgacggaaacggccaacagcgctatcggggggaatgtctccttccgcccgaaatcagcggatgattacctgcgcccgggcaagaccagcgccttcggctaccgcagcggttacgactctgcggatcgcagctggcacaacggggtgaccgtcgccggcggcgatgagttcctgcgcgggattttggtctatagccgccgtgacggccaggaaaccgaaaacaacagcggcaccgtcgacgcctacccggcgaactggcactccgatgcttttctggcctccgggatctggcagcctaacgatgagcacaagctgaccagcaccttcgactattaccataaaaccaaccacacccactacgatacctgggactccagcggcaacagcaccatcggcaccgccaaccagaccagccagacccggcgctggggcctgagcctgaaggatgactggacgccgatgaacgactacctcgacagcgtctccacaaaaatctactaccagcataccgaagcccatgactggacttatatgccggacagcgtcacccgcagaatgcagacggtgaactctaactacgataccgacacctggggcctgcaggccgcgctggcgaaaaccctgggccgccacgatctgagcgccggtttcaacgccagcaccagcaaaacccagcggccgttcagccagtcgccgatccccagcgtttacagcgagatcatgcagccggaggcagacagccgcagctacaccctcggcggctttgtccaggataagatcaacttcgatctcgacagccacaacttcgccgttattcccggcgtgcgcgtggtgcatcaatcgactaagccggaaaatctgtccgatctcgccgccaacagcagcgtgctgagcgaatcgtcggtggcgaatctgtacggcaaaaacagcgatacccaggttctgccgtcgttgaccttccagtacgacctcaccccgcgcctgatgacctacctgcagtaccagcgcggggcgcagttccccaacgccagccagctgtatggctcctggaacctcggctccagctacgccggcagccagcagtatgccctgatcggcaataccgatctgaagacggaaaccagcgataatctcgagtgggggctgaaaggggaagttaccgaaggcatcaccctgcgcacggcgctgttctacaacagctataagaactttatcgcctatacccgctatacccgcgccaacaatccgggccagttcacgaatgtgccgtcgaacatctacaccatttatcaggcggaaaaccgcgataaagcctatatctacggcggtgagattagcaccaaatttaactttggcacctggtttgagcaggtggacggcctgagcgccaccctcgccctcggctatagcgaagggaaatcgaaatccagctacagcggcgataaatacgtcgacctcgacagcgtggcgccgatgaaagccatcgtcggcgtggcgtgggacgatccggcgaaacgctacggcaccgccctgacggcgacctttgtcaaagggaaacaggcgaccgccaccaaccgcgaaagctacagcaacagcggatccgccatcaccgatgccagcagcgactatatgcgcgtgccgggctacggcatgctggactggaccgcgtactggcaggtggcgaaaaacgtgcgcctcaatggcggggtctacaacctcaccgatcgtaaatactgggattacctgagcagccgcaatatcgagaccggcaccaaccaggacgccaacgataaagcgctggcggtgatgccgggccgcacctggcagctgggcgtcaacgtcgacttctgattgcccgaataataacgcacctgcccccggcccgccggccggggatattcatcgtcgagaaggatatgattatgccaaatgcacaccctgacctgtggcagcgctaccaggccaccaaagcggccagtaccgcgaaatatgcccgcgatatcgccgcggaaatggggatcagcgaagccgagctgaccgccgcccgcctcggccatgatgccgtgcgcctgagcgatgacgcccgggcgctgattgccgccctggagcgcgtcggcgaaaccaaatgcatctgccgcaacgagtatgccgtgcatgagcaggtgggccagttcacgcaccatcacctcagcggccacgccgggctggtgctgaacccgcgtgcgctcgacctgcgtctgttcctcagccagtgggccagcgccttccatctgaacgataatggccgtcagagcatccagtttttcgaccaccacggcgacgccctgctgaaagtctatgcgaccacgcagaccgacatggcggcctgggagaccctgatcgcggaatatcgggtggcggcgccggcaccgctgaccctgcgcccgctggagccggtgaaatatgccgataccgccgacggcgccgccctggagaacgactggcgcgcgatgaccgacgttcaccagttcttcggtctgctgcgtaaatatcagctttcccgccagcaggccttccgtctggtgagcgacgacctcgcctgccgcgtggatcgccatgcgctgccgtcgctgctggagacggtgcgccaggagggcaatgaaatcatgattttcgtcggcaatcgcggctgcgtgcagatctttaccggcgccctggaaaagctggcccccatgcgcggctggctgaatatcttcaatactacttttaccctgcatctgcgcgaagagagcgtcgatgaagtgtgggtgacccgcaagccgacttcggacggacacgtcaccagcgtcgaactgttcgctaaagacggcacccagattgcccagctctacggccagcgcagcgaggggcaccccgagcagacgcaatggcgccagcaggtagaccgcctgacccgtgaagggcagcccgcatgatgcgctggttactgctcttgatcgctttcccgctgctgagtcacgccgccgttgagcggctcgtcacactcggcggagatgtcactgagatcgtttatgcccttcacgcggaggagagcctggtggcgcgggacagcaccagcagctggcccccggcggcgcaaaagctgccggacgtcggctacctgcgacagctgaacgccgaggggatcctcgcgttacgcccgcagctggtgttagcgagcgcccaggcgcagccctcgctggtcttacacaaggtacaggcgagcggggtgaaggtggttaacgtgccgggcggcgaaagtctgtccgcgatcgataacaaagttgctgtcattgccgaagcgttaggcaaaacggcggcaggcgacgcgctgcgccagcagcttcagcagcagatcgccgccattccaacgcagccggttgctaagcgggtgctgtttattctcagccacggcggaatgaataccctggtggccggacagcataccgcggccgatagcgccattcgcgccgccggattgcagaacgcgatgcagggcttcgaccactatcgcgccatgtcgcaggaaggggtcgccgccagccaggcggatctggtggtgatctccgccgatggtctcaaagggatgggcggcgaagccgggctgtggaaactgcccggtctggcgcagaccccggcggggcgtcataaacagctgctgacgatcgacgatatggccctgctgggcttcgggccgcgcacaccgcaggcgataatcgcgctgcgaaacaaagcggagcagttgccctgatgcgccctgccctcactcgccgtttgctgctgatgacgctgctgctggtctccctggcgttgtttgccaccaccctcggcgccatgcgcttgccgctggtcaacctgctgccttccggggatgacatgctgcgccacatctggctgaccatccgtctgccgcgggtgctgctggccctgctggtgggcgcggcgctggccctctccggctgcgtgatgcaggggctgtttcgcaacccgcttgccgacccgggcctgctgggcatcagcagcggcgccgcgctggcggtggccagctggctggtgctcccgttctccgctgcggggctgatcgctctgtatatgccgatgctggcggcgtttattggcagcctggcggtgatggtggtgattttcatcctcagtcgggcggaggagggttcgctgtcgcgcctgctgctggtggggatcgccatcaacgcgctgtgcggcgcgctggtcggcgtcctgtcctggctgagcaatgacgcccagctgcgccagctgtcgctgtggggaatgggcagtctgggccaggccgaatggccgacgctgctggtggccgcgaccttgattatcccggcggcgctggcggtgtggtggatggcgtcccgcctcaatctgctgcagcttggcgatgaagaggcgcactatctcggggttaatgtgcaggcgctgcagcgctggctgctgctgtgcagcgcggtgctggtggccgtcgcggtggccatcagcggagtcatcggctttatcggcctggtggtgccgcacctgatgcgcctgtggctgggacctgaccatcgcggactgatccccggctcgctgctggccggcgcgatcctgcttctgctggccgacaccctggcccgcaccgtggcggcgccggcggagataccggtcggtctgctcaccagcctgctgggcgccccctggtttctgtggctggtctttcgtcgggagaactccagacatggttaatgaatacagcgcccaggggctgtcacttcaccttggtaaacgacagattatcgacaacgtctccgtcgcgctgcgcggcggcgagatgacggcgcttatcgggccgaacggcgccgggaaatccactctgctgcgcctgttgaccggctatctgactccggacagcggcacccgccatcttgcaggcaagccgctggaagcctggtcgcccgaggcgctgtcgcgccggcgggcggtcatgctgcagcgaacggccctgcaggccgactggacggtggaaacggtcattgccatgggacgctcaccgtggggcgcgacggcggatccggcggtgctggcggcggtgatggccgtcaccggctgcgatggccttgccggtcgccgctatcccggcctctccggcggcgagcagcagcgggtacagctggcccgctgtctggcacagctatggcgcgacggcgcgccgcagggctggctgtttctcgatgagcctacctcggcgctggacctttactatcagcagcacctgctgcgtttgctcaaacggctcaccgccggcgggcaactgcacgtctgcgtggtgctgcatgaccttaacctcgccgccctgtgggccgaccgcatcctgctgcttcaccagggacatctggtcgcccagggcacgccgcaggaggtgatccagcagccggttatccatcgctggtacggggcggatgtccgcctcgtccagcacccggacaacgcggtcccccaggtttatctggcgccataatccccgcgcggcgcaactggaatccggatcgcgccgcgcttacgctttctggcaataattgcctgcattatattattgagggtcatttatatttaaaatctataccaatggcgtaataacccaatgaaatatttacgacagctatttttaaatataaaccatcattacagagaagatatttcccgtattaatccaaaaacgacacattgattatttactgcgcttaatcaactcgatacactgttttcttactaatgataatagagggaagaagaagcatggctattccaggtaatatgtggatatatgacgacggtggggcactaatcaaaggtggttgtgatgttgcagacagggagttcagcatcgaatttaaagggtttcatcacaatctctccattcccactgataatgccactggcaagcctaccggcactcgtcagcactcaccaatgatcatcgttaaagaattcgactattccagtccatacctctacaaagcagtagctactggtcagaacctgaaatctgctgaaatcaaatggtataaaatcagcgatgctggtcaagaagtggaatacttcaatatgctacttgaaggcgtccgaatcgtatcaatatctcctacaatggcttccccagaagacaagaacaacaaccatcttgaatctgtcgaacttagatatgagaagatcacctggaaacattgtgacggaaatataattttcaccgatgcctggaatgaaagacaaacagcataatagatgagcaaatggatacgacagaagaactaaatggaacctatttctatcacggacaatccaatctttcggctggtgaactttttgatgtcatttttcttgaacaattttgtgacgaacttggcattggtattgaatctggtgccgctatcctcgccgggcaaccttggctaaaaaccagaacaaagccaggagaggcaataaaaggaacaagtgttgtttctaaatatggaaggatgcttctgagaaatgcaaaaactccatttggtattagggttcctacacccgttggtgtaagaatgagaaaaacgaatagtcttgctgctgttatcgcccgttatgttccgtggttaggttggataggacttgtaaactcaatttatcaagtttcaagaaaaactcaggaaaaatacaacctaatagctcgccccaaagaccgtatacaatggacatccttttaatgaaaagcattcaagatcaggttttagacttgtttaaagatgagatctcaacccgtttagataaaaattggaaagaaatcccattggaacttgattatgacttatttgatgctcccggcgacgatctgcttgacgctttaaataaatttgaacaaaaatttaatgttgatctttccagtgttaaatggtcgtgttatttcccttgggagaatactccaatgctaactcggtggtttaaagtaaaacgagaagatgtagaaaaaacgcgtaaacctttaactatcaaaatgtttgccgaatcagcaaaagcaggtaaatggctttacgactagcaaccacaagccgttgtcgtaacgaggtctacggccagaaggcagaacaacatcgacggcgaacgtaatgtatgaagacgatcgcgtggcggcggttcaattactgtgacggtaccccgccccctctgcaactggaatccggatcgcgccgcgtgctttcatcggtttccctcacctgcccatctccgttattatgtctcatccatgtgataacgacgaaaactacaaaatcgcagccatttaaaatcagggatctggataacaccccatgagcacaattgacaatctcgacgcccacacgccgatgatgcagcagtatctcaagctaaaggcgcaacatcctgacattctgctgttttaccggatgggggatttttacgagctattttatgacgatgcgaaacgcgcctcgcagctgctcgatatctcgctgaccaagcgcggcgcctccgcgggcgaaccgatacccatggccggcatcccccaccacgccgtagagaactacctcgccaaactggtcaatcagggcgagtcggtggccatttgcgagcagattggcgacccggccaccaccaaggggccggtcgagcgtaaagtggtgcgtatcgtcaccccaggcaccattagcgatgaagcgctgctgcaggagcgccaggacaacctgctggccgccatctggcaggacagcaagggcttcggctacgcgacgctggatatcagctccgggcgctttcgcctgagcgaaccggccgaccgcgaaaccatggcggcagagctgcaacgcaccaacccggcggaactgctgtatgcggaagattttgccgaatcgtcgctgatcgagggccgccgcggtctgcgccgtcgcccgctgtgggaatttgaaatcgacaccgcgcgccagcagctaaacctgcagttcggcacccgcgatctggtcggcttcggcgtcgaaaacgccccgcgcggcctgtgcgccgccggctgcctgctgcagtatgtcaaagacacccagcgtacctcgctgccgcacatccgctccatcaccatggaacgccagcaggacagcatcattatggatgccgccacccgccgtaacctcgagatcacccagaatctggccggcggcaccgacaacaccctggcctcggtactcgactgtacggtgacgccgatgggcagccggatgctcaagcgctggctgcatatgccggtccgcgataccgccgtgctggtggagcgccagcagaccatcggcgcgctgcaggagcgctataccgagctgcagccggtgctgcgccaggtcggcgatctggagcgtattctggcgcgtctggcgctgcgtaccgcccggccgcgcgatcttgcccgcatgcgtcatgccctgcagcaactgcctctgctgcgtgagctgctggccgacgttgacagtcagccggtgcaaaaattgcgcgagaaaatgggcgagttcaccgaactgcgcgaactgctggagcgcgcggtgatcgacgccccgccggtgttggtccgcgacggcggggtcatcgccccgggctatagcgaagagctggacgagtggcgggcgctggccgatggcgccaccgattatctcgataagctggagatccgcgagcgcgagcggctgggcctcgataccctgaaagtcggctacaacgccgtccacggctactacatccagatcagccgcggccagagccacctcgcgccgatccactacgtgcgccgccagacgctgaaaaacgccgaacgctacattattcctgagctgaaggaatacgaagataaggtgctgacctccaagggcaaagcgctggcgctggaaaaacagctttatgacgaactgttcgacctgctgctgccgcatctcgccgatctgcaaaccagcgccagcgcgctggccgagctggacgtgctggtcaacctggcggaacgcgcggaaaccctgaactactgctgcccgacctttagcgataagccaggcattcgcatcagcgaaggccgccatccggtggtcgagcaggtgctgaaagagccgtttatcgctaacccgctgcagctggcgccgcagcggcggatgctgatcattaccgggccgaacatgggcggtaaaagtacctatatgcgccagaccgcgctgattgcgctgctggcctatatcggcagttacgtcccggcgcagaaggtggagatcgggcccatcgatcgcatctttacccgcgtcggcgcggcggatgacctggccagcggccgctcgacctttatggtggagatgactgaaaccgccaatatcctgcacaacgctaccgaacacagcctggtgctgatggatgagattggccgcggcacgtccacctacgacgggctatcgctggcgtgggcctgtgcggaaaatctggccaacaaaatcaaggcgctgaccctgttcgccacccactacttcgagctcacccagctgccggagaaaatggaaggcgtcgccaacgtccacctcgacgcgctggagcacggcgataccatcgcctttatgcacagcgtgcaggacggcgcggccagcaagagctatggcctggcggtcgccgcgctggcgggggtgccgaaagaggtgatcaagcgcgcgcggcagaaactgcgcgagctggagagtatctcgcccaacgcggcggcgacccaggtcgacggcacgcagatgtcgctactcgccgccccggaagagacctcgcctgcggttgaggcgctggagaatcttgatccggactccctgaccccgcgtcaggcgctggagtggatctaccgtctgaaaagcctggtctagccccccattaaggtgaaaaacggcagcgctgtgaagcgctgccgttttagtaaacaaaaaaatgggtgctagaggatgcgtcctgacaacccatacgcggggttgccctcgcgcggatgctacttcttcgattcgtaagcgagaacagctttaaactcaatattacgctctttaatactcagctcgcatagtgagctgtgcaccaacagcgtaaatcccagtaccgtaatacagagtacgatgattgccacaagggcatattttgtcagcatatcttgcctccctgcaaagaagagactaacatctgaattgtctatgttcattcgctagcctcagttgatagaaatatctcctggggctttcgtctgtctgggggcctggtaatgctcaaggccagacagcctcaagcacccgccgcaattctacactcgtcagggcgtgaaatttatctgcaaggaattaatcagacgaattttataataatctggatgcaggctcgcaaagtcatcccggtatattaacccttcacgtaattttttaatttaatgaaaaaaaataatttccataattgtactaaatataaaaaaggcccgacttagcgggcccctttcattaacgcttatcttccggcaatagcggcggtacgtgcggcacctgcggcgcctcatcgatatctttctgcgtcatgcggaacgcttccggatagtgttcgcggctggtgcggcgcagcggctcggtatctcgccaggtgtaaagacagtgctggcactgatacacggtccagacccctttcaccggcgaggtcgccatgacttcaatcttttcatcggcgcaacgtggacaaatcatcttcttctccttatttacggttggccagcatagcggtcagtttttcagcccaggctttggtttccggcagatcctgcaccggctggctgtagtgaccgcgaaggtccggcgcaaccggggtggtggcgtcgataatcagtttgtcggtaatgcctgccgggctggagcctgggtcaagttcaaggaccgacatgttcggcaactgcaccaggtctcccgccgggttaaccttcgaggagagcgcccacatcacctgcggcaggttgaacgggtcgacgtcttcatcaaccatgatcaccatcttcacatagccgaggccgtggggagtggtcatcgcccgcaggcccaccgcgcgggcaaaaccgccgtagcgttttttggtggagatgatcgccagcagaccatgggtgtacatggcgttgaccgcctgcacttccggaaattcggccttcagctgctgatacagcggtacgcaggtcgccgggcccatcagatagtcaatctcggtccacggcataccgaggtagagcgattcaaaaatcggtttgctgcgataagagactttgtcgatacgcactaccgtcatgttacgaccgccggagtagtgaccggtaaattcaccgaacggcccctcgatctcacgcttacgcccttcaatgaccccttcgaggatcacttccgaaccccagggcacgtcaaagccggtcagcggcgcggtagcgatgggatacgggctctcgcgcagcgcgccagccatctcatattcagactgatcgtatttcagcggcgtggcgcccatcagggtaataatcgggtcgttaccgagggtaatggcgatcggcagatcttccccacgctcttccgctttgtgcagatgcagcgcgatatcgtgcatcggtaccggctgcaggccgagcttgcgcttgcctttcacttccatgcggtagataccgacgttttgcttaccgaagttatctttatccagcggatcgcgtgaaacgacacaggctttatcgaggtagaaaccgccgtcaccatcattgaggcggaacagcggcagaatatcgaacaggttgatatcatcgccatcaacagtattttctgcccacgccgggttggcgcggcgctctggcgtcaccgggaagttatcccagcggcgaatgaactcatcaatctgctttttcaccggcgtgttaggcggcaggcccagcgagatggcatggttctgccacgagccgatggtgttcatcgtcacgcgagcgtcgttaaagccgcgaatattatcgaaccacagcgccggggcaccgtcgccgatgcgtccggtcgcattggcggccgccgccagatcgggctcagcgttcacctcttcactgattttcagcagttgtccctggtcatccagcgcctgcaaaaagctgcgcaaatcatcaaaagccattattcgatctcctgtgcaaattgttctgccgtgcgtaagccgttccagcggcgcgctttgtgatagtcgaggccaaactgatccagcacccgggtgacgatatgattggtgatatcgtcaaccgtctccgggtggttgtagtaagctggcatgggcgggaccatcgccacgcccatgcgggacagcgccagcatgttctccagatggatcgtgctgagcggcatttcccgcgggaccaacaccagcttgcgcccctctttgagcaccacgtccgccgcgcggcccaccagcccttcggcataacccgcgcgaatgcctgcaagcgttttcatactgcagggaataacgatcatgccgtcggtacgaaatgaaccggatgagatggtggcggcctggtctgccgggctgtgggaaaagtccgccagcgcggccacttcgcgcgccgtccagggcgtttccagctcgatggtggttttggcccatttcgacatcaccagatgggtttccacctccggcatatcgcgcagcgcctgcagcaatgccaccccaagcggtgccccggtggcccccgtcatcccaataatcagtttcattccagacctcattacttttgttcgtgtacgaactttatatttaaactaccccctccagcccttattggcaagatcgttcgtatacgtgcgcatttttaatcaaaacgcagaaagggtataaaaaggcgtacgaacggctatcatagaggtgacagttttgttacggagtattcatggagttacgaaacgaagcattccacctgctgcgccagctttttcaacagcataccgcccgctggcagcaggcgttgccggacctgactaaacctcagtatgcggtgatgcgctcggtagcggagcaccccgggatcgaacaggtggcgctgattgaagcggcggtcagcaccaaggctacgctggcggagatgctcagccgaatggaagcgcgcggcctggtgcgccgggagcacgatccggccgataaacgccgccgttttgtctatctgaccgacgaaggcgaggcgttgcttaaccgttccattccgcagggcaatgaggtcgatgacgagtttctcggccgcctgagcgatgacgagcgcgagcagttctcccggctggtgcacaaaatgatggcgccctgaacgggcgcttaaccgaccttctcgcgcaggaagtcaataaatgcccgcacccgggtcggcaaatgctgcgagtcgggataaagggcatacacgccctgctgtgggaaatggtattccggcaggagcggcaccagctcccgctgcgccacctttttggctaccagccatgcgggcagcaaggcgacgccgcatcccgccagagcaaagctcatcagcgccgtagcgctatcagcagaaaaccgcggcgcgctggctatcgagaaatccacctctgtctggtgatccgtgcgcagctgccagcgcagcggcgtcggcaggcgctcgtgaataatccactcagcttgcgccagatctgacagcgtctgcaccggatggcttgccagccaggccggagaggcgacgggcaggatcgcgaaactggctatccgcgtcgcccgatagcgggaatcggccagcgtaccgaggcgtatcgccacatcaaatcgttctgaaatgaggtcggcatgatgggaggaggagacgtggcgcacccgcagcgccggatgacgacgggcgaacgcggccagcgctggaatgataacctgcgcgccatactccggcgtggtggtgatccgtagctccccgcttaagccgctatggctggcccgcacttcatcctggagattttccgccgcgttcaggagcgccaccccgcgctgatagaacagcaccccggcgtcagtgagccgcaaacgccgcgtcgaacgcagcagcagcgtcacccccagctcattttccagctgccgtacgttaaagctgaccactgccttggtctgccccagcgccgctgcggccagggtgaaactgccggcatctaccacggcgataaacatggtcacgcgctgaagattaagcatcgtcgtccggatgattgtcaaaaatattcagacagtatatcccgattagtcccgtttatccctcgctgcggcaggtttacagtagccgcctgtctgagggagtgaaccatgacctaccgccaccgcgttgccaccgtttttctgttcggcttttttctcgatttgatcaatatgtttatcgccagcatcgcctttccggcaatcagccgcgcgctggcggtttccgtctcgcaactggcgtgggtcagtaatgcctatattctcggtctgacggtcgttgtgccgttcagcgcctggctcagcgagcgctggggggcgaaacggctgtttttactctcgctggggctgttcagcctcggcgcgctggcggcaggacttgccaacagcctgagcgaactaattttatggcggacgctgcaggggatgggcggcgggctgttaatccccctcggccaggcgctgacgtggccgctgtttcagccgcatgagcgggcgaagctgtcggcggcggtgatgctggtcggcctgctggcccccgcctgctcgccggcgatcggcggcctgttagtcgaggcgttcagctggcgctgggtctttttcgccagcctgcctgtggctctgctaacctttgtgctggcggtgcgatggctgaacgacacccccggtccggttcgcccgactcgctttcttccactgtcgctgctggccgatcccctgctgcgcttcgcgatgctgatctacctctgcgtgccggggatgtttattggcgtcaacgtggtggggatgtactacctgcaacgcgtcaccgggatggcgccgggggcaatcggtgccctgatggtgccctggtcgctggcctcgtttgccgccatcacctttaccggcagatatttcaaccgcttcgggccccggccgctggtcatcatcggctgcctgcttcaggcgatggggatcatgctgctgctgaagatcgatgcggacagcccgctggcgctgttgattctggcctttacgctgatgggcggcggaggcagcttatgcagcagcaccgcgcaaagcagcgctttcctgcatacgcctgccgaagagatgcctgacgccagcgcgatatggaatcttaaccgccagctcagcttctttgccggcagcgccctgctcgccctgctgctgagggtattcccgccggcctacgcctggcagggggtatttatcagcgccgccgtcattaccctgttgccgctgctgttttgcctgcggctgaataatcgggcgattatccatcgcctgcacaccactctggagaagtcatgaatccttatctgcaggaagtcctcgatgcccatgtccttatcgaacgctggttaagccatggcgaaggaagcgctgaggcgctgatgaagcgttttgccgccgattttaccatgatccccttgagcggtgagaagatggactacccaacggtgagccgttttttccaccacgccggcggcagccgtccggggttagatatcgtagtggatcagatggaaatcatcagcgagtggcacgacggcgccgcagtgctatatcgtgaaagccaaacgctggcggatagcagtcagaacgttcgctggtcgacggcgatttttcaacaagcggaagggaaaattgtctggcgccatctgcaggaaacccgcctcggctagcccaaagaaaaaggccccgactttcgaggggcctttttgacagaaaacgtcttattcgcggaagagcgcttcgatattcagcccctgtccctgcagaatttcccgcaggcgacgcagaccttccacctggatctgccgcacgcgttcgcgggtcaggccaatttcacggcccacatcctccagcgtggcagcttcataacccagcagaccaaaacgacgtgccagaacttcacgctgcttggcgttcagttcgaacagccatttgacgatactttgcttcatatcatcgtcctgcgtggtgtcttccgggccgttctctttctcatcggccagaatatccagcagcgctttttctgaatcgccacccagcggagtatccacggaggtgatgcgctcgttcagacgcagcatacggctgacgtcatcgaccggtttgtccagctgttcggcgatctcttccgcgctaggctcgtggtccagcttatgggacaactcgcgcgcggtacgcagatagacgttcagctctttaacaatatggatcggcaaacggatcgtacgggtttggttcatgatcgcccgttcaatagtctggcggatccaccaggtcgcgtaggtcgaaaaacggaacccacgttccgggtcaaacttctcaacggcgcggatcaggccgaggttaccttcttcaatcagatccagcaacgccagaccacgattgctgtaacgacgggcaatcttcaccaccagacgcaagttactttcaatcatgcgacggcgtgaagcgacatcaccacgcagtgcgcgacgcgcgaaatagacttcctcttccgcggtcagcagtggggaataaccaatctctccaagataaagctgagtggcgtcaagtacgcgctgggttgcgccttgcgacagcagctcttcctcagccagatcgctatcactgggttcctcttctactaaggctttctcgtcgaaaacctcaattccgttctcatcaaattccgcgtcttcatttaaatcatgaactttcagcgtattctgactcataaaggtggctcctacccgtgatccctgagcaaagcaccttccacggcacatcaacaaacgacgcctggacgatttcccctgccctctctgcgagaggaacgtagacaccgccctggcgcctgttagctgatgcttcgcttatccgtactttgccaaattatcgctgcggtaagtactgcagcgggttgacggatttccccttgtaacgaatttcaaaatgtaatcttgttgagctggttccggtgctacccatggtagcgattttctgccccgctttgacttcctgttgctcccgaaccagcatggtatcgttatgagcgtaggcactcaggtaatcatcgttgtgtttgatgataataagattaccgtagccgcgcagtgcgttaccggcatagacgacgcgcccatcggcggtcgcgacaatagcctgtcccttactgcctgcaatatcgatacctttattgccgccttccgcgccgctaaagttctcgataaccttgccatcagtcggccagcgccatgttgagatcggcgaactggttgacgtactgcttgcagtcggctgggttgtgctcaccgttgttggtgccgtcaccggcgcgacaaccgttgtggttgtagtcgctggtttattattaggcaacatcttggtagcactctgttcacctgaagattcagaatacgtaatagtcggttgtgaagcaaccaccgcggtcgatttttgtgcagaagttgtgctggtcgtcgcaccgccgctcgctcttgcgctggcctgagaaacggcgttttcgccggtgatcggctggcctgaggcgttaccgacctgcagtacctgccccacgttcagcgcgtacggggccgggatattgttgcgttgcgccaggtcgcggaaatcgttgccggtgacccaggcgatatagaatagcgtgtcgccgcgttttaccgtataggtactgccgccggtatagctacctttcggaatatcgccatatttgcggttgtaaacgatccggccatttaccgtctgtaccggctcctgcgccaccggcgccggctgcggctgaatggtctgggtctgcatcggctgaatcggctgcgcctgaggagcggacttgacgccggagggtggcggcgtaatcagcatgccggagttggtgctggaagaggcggcgccgccggcagagctaaccggcgcaggcggattattggtgttggtacacccggccagccagagtgaaaccagtgaaagagccgcaatacggctgacggtaaatttggtgcttcccgcgctcatttatcccccaggaatatgttaactgccaatatcttgcttaccgggcggcgcccggccaggacactgaaaaatgtgtccaccctacgcctaaagtcaggcaaaaaaaacctggaataatccgggtctcaggccagctcccccttcaccaggggaacaaagcgaacggcctcgacggtatcaatgataaattcgttgccccgacgacggatccgtttgagaaactgatgctcttcgccgaccggcagcaccagcacgccgtcatcatccagctgcgccagcagcgcggtcggtatttccggcggcgccgccgtcacaataatggcatcaaacggcgcccgcgcctgccaaccttgccacccatcgccatgacgggttgaaacattatgtaaatcaagttgtttcaggcgacgacgcgcctgccactgtaaactcttaattcgctctaccgagcatacgtgatgcaccagatgcgccaggatggccgtctggtagccggaaccggtgccgatctccagcacccgcgactccggcgtcagcgtcagcagctcggtcatccgcgccaccatatacggctgggagatggtctgcccctggccaatcggcagcgcggtgttttcccacgctttatgttcaaaggcttcatcaacaaacttttcgcgcgggaccagcgcgatcgcctcgaggacacgttcatcgacgatgccctgcgtgcgcagttgattcaacaaactttcaacacgtttacttaccattgcctgtcaaccccgacacgttccagccaatcggtgaccacctcatgcgcctgatgggcggttaaatcgacgtgcaatggcgtcacggaaacatagccttcatccactgccgcaaaatcggtgcccggcccggcatcgcgcttatcgcccggcggaccaatccagtacaggatgttgccgcgcggatctttttgcgggatcacctggtcggccggatggcgattgccgcagcgggtcacgcgaatgcccttgatttgatcaagcgggagatccggtacgttgatgttaaggatccgcccggtacgcagcggctcgcggcttaaggcgcgcagaatggtgcaggttaccgccgcggcggtatcgtaatgctgatagccgttcagcgacacggccagcgcggggaaccccagatgacggccttccatcgccgcggccacggtgccggaatagatgacgtcgtcgcccaggttggggccggcattaatgccggaaaccacgatgtccggacgcgggcgcatcagcgcgttcacgccgagatagacacagtcggtcggggtgcccatctggacggcgatgtcgccattttcaaaggtaaacgtacgcagggacgattccagcgtcagcgaatttgaggccccgctgcggttacgatcgggtgcaaccacctggacctcggcaaactcccttaaggccttcgccagggtctgtatccccggcgcatggatcccgtcatcgttactcagcaatattcgcatagtcacccgttgtattgataagctccctgaccacgctggtggcgaagctgcccgccggcagccagaaacgcagttcaacggttacgtcatcccaccagttccagctgagctgctgtggatagagaagcatcgcccggcgcgccgcctcgactttctcccgtaccagcagcgcctgcaacgcggtttcctcggcgatcgcggcctgctcgaaagccagggcgtcgcgctggcttccccagtcgccgctgcccggcagcgtggccgtaatcatcagttcgcggttatgcacccgcgcctgcgaaacctcgagttcttccggtgtgacgacaaaccagctcccgcgccccgctaattgtagcgcatcgccatcaacgacctgattaaattccgttttttttaatctaatactcacttgctgattaaacaacgcgctgcgggctgccgacaaccaaaaactgcgcttattgcgatcgcgcactggcgcgccgctctccgcccagcgcatggcgccctgcaggttactgccgccaatgccaaagcgctgcgcgccgaaatagttcggcactccccgttcagcgatggcctgcagacgcgtctccacgtcctggcgatcgctaatctcgcgcaggatcacggtaaactggttgcctttcagcgcgcctaaacgcagcttacgcttatggcgagcatattccagtacctggcagccctcgagctgaaatttgctcaggtccggcatctctttgccgggcacccgggcgcacagccactgctcggtgaccgcgtgcttatccttttgcccggcgaagctcacttcacgggcgtggatcttaaggaatttcgccagcgcgtcggcgacaaagcgcgtattgcagccgtttttcaggatccgcaccagcacgtgttcgccttcgccgtccggggcaaagcccagatcttccaccaccagaaaatcttccggattggctttcagtagcccactgctctgcggtttgccgtgcagccaggtcagttggtcaaaggcgatcatttgtcggccttacgcagcagcgcaaccgcttcgcaggcgatcccttccccgcggccggtgaagccgagcttctcggtggtggtcgctttcacgttgacgtcgtccatatggcagccgagatcctcagcgataaagacgcgcatctgcggaatatgcggcagcattttcggcgcctgggcaataatcgtgacgtcgacgttgccgagcgtatagcccctggcctgaatgcggcgccatgcttcgcgcagcagttcgcggctatcggcgcctttaaacgccggatcggtatcggggaacagcttgccgatatcgcccagcgccgcggcgccaagcagcgcgtcggtcagcgcatgcagcgcgacgtcgccgtcggagtgggccagcagccctttttcataaggaatgcgtaccccgccaatgatgattgggccttcaccgccaaaagcgtgtacgtcaaaaccatgtccaattcgcattaagctttctcctggtgtcgggaacgggtgaggtaaaattcagccagcgccaggtcttccgggcgcgtcactttaatattatccgcgcgtccggcgaccagctgcggatggaagccgcagtactccagcgccgaggcttcatcggtgatagtggctccctcgtttagcgcgcgagtgaggcaatccaccagcagctcgcgagggaaaaattgcggggtgagcgcatgccacaggtcattgcggtcgacggtatgggcaatagcggttttgtccggctcggcgcgcttcatggtgtcgcgcactggcgccgcaaggatcccgccgacgcggctggtttcgcagagcgacagcaggcggctgaggtcgtcctgatgcaggcaggggcgcgcggcgtcatgcaccagcacccactgcgcctccggcaacgcctgcaggccggcgagcaccgaatcggcacgctcggcgccgccatccaccacggtaatctgcggatgctgcgccagcggcagctggctgaagcggcgatcgccggggctgacggcaatcaccacccgctggacgcgcgcatccgccagcagcgcggcgaccgcgtgttcgagaatcgttttgttaccgattgagagatattgtttcgggcattccgtttgcatgcggcggccgaaaccggctgccggcaccacggcgcaaacgcccggaaaagtggctgccatgttgtaatcctgggcctggttatcgattgttctgctgttgccccgatgcctgattgcgtttagacgcatccggtaccagacgatagaaggtttcgcccgggcgggtcatgctgagttcattgcgcgcacgctcctcaatcgcttcctgcccgccgttgaggtcgtcaatttcggcaaacagctgatcgttgcgtgcttttaatttggcgttagtcgcctgctgggcggtgacgtcgtcgttaacccgcgtgtagtcatgcaggccgtttttaccgaaccacagcgaatactgtagccagaccagcaaagctaataatagcagcgttagtttacccatcctgccccctgaaaaacggcatcatcatcccaaaactcgcccgggtacgctaccggggcgcgcggacgatgccgcgtaacgcggggactgtaccatatttttgctgtcgatacccatgcttgattcataccagcaacgggttatcccaacagccagaggaagagtagcgcaaacatcagcccaacggtcaggatggtcgcgctgacgctatagagcagtttgccattgagcagagagtgcagcgcaataccgaccaccaccgccaccggcatcaacgcaaggaagaatggccaggtgtagaggagaaagaagagtgtattactgccatagagaaggaagggaatacccagcgccagcagccacgaaataaagcccacggcagcgcccgacaaagaccaggtggtctcgtcgccgatcgccggaggcggttctgaacgaataatactgaggttctgggtattgcgcatatcgaatcctgtagaccgggcaaccggcacccctcgatgccgctgccgtttcaggatctgataatatcgctctgttgcagcaggtctaatagttggtgcaccaaatttgttaccaattgttcaccatccagatgaatttccgccttttccggcgcctcatagaccgagtctataccggtgaaattgcgtaattcccctgcccgcgctttcttatacaatcctttcggatcccgcgcctcgcagatggccagcggggtatcgacgaacacttcgataaagcgtccttccccgaggcgctcgcgcaccatctgccgttccgcacggtgcggagatataaatgccgtcaataccaccagcccggcatcgaccatcagcctggccacttccccgacgcggcgaatgttctctttgcgatcctcatcgctgaatcccaggtcgctgcacaggccatggcgcacgttatcgccgtccagcagataggtgctgacgccgcgctcatgcagggcctcctccagcgccccggcgacggtggatttacccgaccccgaaaggccggtaaaccacagcaccacgccgcgatggccgtgatgctgttcccgctgctgttgggtcacagggtgggcatgccagacgacgttttcgtcatgctgggccattatttgcctcccagcaggtcgcgggcgtcccagtgcgggaaatgtttacggatcagctggttcagctccagctcgaaggcgctgtactgtgatgccgaagtcgatgcctgcaggtgcggctcgttgaccatcccggcgccgacggtgacgttggtcaggcgatcgataaagataagcccgccggtcaccgggttttgctgatacggatccagcactaaaggttcgtcaaaggtcagctccaccaggccgatgccgttcagcggcagagactcgacttcacgctgggtcaggttgttaatatcgacctggtagcggatagcgtcgacgcgagcgcgggtcttcttgccggcgattttgatgtcgtagctctggcccggggtcagcggctgttcggccatccacaccacgtcgatgctggcgctttgtaccgccggcagcgaggcttgcgcgtcaaccagcaggtcgccgcgactgatgtcgatttcatctttcagcacaagggtaatggcttcgccggcggcggcttcctgcaggtcgccgtcgaaggtgacgatacgcgccacgctcgattcgacgcccgacggcagcaccttcagacgctggccaacctgcacggtaccggaggcgaccgtgccggagaagccgcggaaatcaaggttcggacggttaacatactgcaccgggaagcgcagcggctggctctcgaccacccgctggatctctacggtttcgaggacttccagcagcgtcgggccactgtaccacggcatattcgcgctctggctggcgacattatcgccttccagcgccgacaacggcacaaagcggatatcaaggttgcccggcagctgctcggcaaaggtcagataatcttcccggatctcgttgaagcgcgcttcgctaaactcgacgagatccattttgttgatcgccactaccaggtgtttaatgcccagcagcgtcgagatgaagctgtgacggcgggtctggtcgagcacgcccttgcgcgcatcgatcagcaggatcgccaggtcgcaggtggacgcgccggtggccatattgcgcgtgtactgctcgtgccccggggtgtcggcgatgataaatttgcgtttttcggttgagaagtagcgataggccacgtcgatggtgatgccctgctcgcgctcggcctgcaggccgtccaccagcagcgccaggtccagcttttcgccctgggtgccgtgacgcttgctgtcgttgtgcagcgaagagagctggtcttcatagatctggcgcgtatcgtgcagcaggcggccaattaaggtgcttttgccgtcatcgacgctgccgcaggtcaaaaaacgcagcaggctcttgtgctgttgcgcgtgcaggtaagcttctacgccgccttcgttggcaatttgttgggcaatggtcgtgttcatggcggctccttagaaatacccctgacgtttcttcagctccatcgagccggcctggtcgcggtcaatgacgcgcccctgacgttcgctggtggtcgataccagcatctcttcaataatttccggcagcgtctgcgcttcagactccaccgcgccggtcagcggccagcagccgagggtacggaaacgcaccatccgtttttcaatcacctcgcccggctgcagatcgatacggtcgtcatcgatcatcatcagcataccgtcgcgctccagcaccggacgctcagcggccagatacagcggcacgatttcaatattttccagatagatgtactgccagatatccagctcggtccagttggagagcgggaagacgcggatgctttcgcctttgttaatctggccgttgtagttgtgccacagctccggacgctgatttttcgggtcccagcggtggaaacggtcgcggaaggagtagatgcgctctttcgcgcgggatttctcttcgtcgcgacgcgcgccgccgaacgcggcgtcaaagccgtatttgttcagcgcctgcttcaggccttcggttttcatgatatcggtatgcttggcgctgccgtggacaaacgggttgatgcccatcgccaccccttccgggtttttatgcaccagcagctcacagccgtaggctttggcggtccggtcgcggaactcatacatctcacggaatttccagccggtatcgacgtgcagcagcgggaacggcagggttcccggataaaacgctttgcgcgccagatgcagcattacgctggaatctttcccgattgagtacatcattaccgggttagaaaattcggcggccacctcacgaataatatggatgctttccgcctccagttgccgcaggtgagtgagtcgtttttggtccataaccgttccttaagccagattgaccaccgaagcgttaaacccctcggcggatgatgtatgttgaaaccaggcgagctgctgatgcagctgcaccacttcgcctaccaccagcagggcgggcatcggggcgtctttcgccaggtgttcgagttgttgcaatgtgccggttatcgtctgctgatcgtcacgggtgccacgggaaattaccgccaccggcgtgtcgctgtcgcgaccgtgggcgatcagctgcgcgctgatttccgctgccttcatggtgcccatgtagatcgccagcgtctgttggctcttcgccagcagcgaccagtcgaagggggcgctgtccggcttatagtggccggtgacaaagacggcgctttgcgcataatcgcgatgggtcagcggaataccggcgtaggccgtcgccccggcggctgcggtgacgcccggcaccacctggaacgggatccccgcctcggcggcagcctgcagctcttctgcgccgcggccaaaaataaacggatcgccgcccttcaggcgcacgacggttttccccgccttcgccgcctccaccagcagctgattggtttcatgctgcggcaccgagtgctcgccggcgcgtttgccgacgcaaataagttcggcatcgcggcgcaccagctcgagaaccggctgagtcaccagatgatcgtggaaaaccacgtccgcctgctggatcgcctgcagaccgcgaagggtcagcagcccggcatcgcccggcccggcgccaaccagaataatttctcccgtctcacgttcgggcttatccagctcatcctgcagcgccttttccgcctccgcagagttgcccgccaccatcaggctggcgaagcggccggtaaagacgcgctcccagaagcggcgacgcgcttcggtagtcgtcaggcgggttttcagatggttgcgccagtagcttgctgattccgccagccgaccgagattcgtcggcagcagcgcttcgattttttcacgcagaatgcgcgacagcaccggcgctttaccgctggaggagatcgccaccagcagcggcgaacggtcgacgatagaagggaaaacaaacgagcacagcgcctggttatccaccacgttgaccaaccggtagcgcgcgttagctgccgcaaatacccgctggttaagcgcctcatcctcggtggccgcaatcaccagaaagacatcatccaccagcgagtcgctgaattccgtcgcccgccagctgagtgcctggcgcgcagccagatcggccagcgccggtgacagcgtttcagcgaccacctgcacctgcgcctgggcgcgcagcaagaacttgatcttacgttcagcaatctcgccgccgccgatcaccagcacgggcctttgtttcagttcggcaaaaaggggcaagtaatccacggtgcaacaactctcttacattcagcgatactgcgactatagggtgcgccttagagcaaatgaaattacgaaatggaatgagttgtgacgcaaaggaataacgcggcggaaatacaaatatcaaaaagtgcttaacgcgctatttttccgctatttaagagcaattgaaattgtttaaccgcggtcacagtttcatactgtacgcgtcaaattgtcttgttcgtgtaaggaccccttatgttttccgcgttgtgccgccgtctgcttccgctggcgctcggcaccggttttgtttttgccgccgcccccgcattcagcgcgctgggcgacaccgccagtagccaggcccgccatatcgccaccgtcttcccgggacgaatgaccggaacgccgccggaaatgctctcagctgactatctgcgccagcagttcgccctgatggggtatcagagcgacgtgcgaagcttcaatacccgctatatctttaccgacagcaatcagcgcaagaactggcataacgccaccggcagtacggtgatcgccgcccatgaaggtaaagtgcgccagcagattattatcatggcacacctcgacacctatgcgccgcagagcgataaagacgtggagaacaacctcggcggcctgacgctgcagggcatcgacgacaacgcgatgggacttggcgtattgctggagctggcggagcatttaaagaacgtccctacccgctatggcatccgctttatcgccaccagcggtgaagaggaaggccgtctcggcgcgcaaaacctgctgcagcggatgagcgaagcggaaaagaaaaataccctgctggtgatcaatctcgataatctggtggtgggcgataagctttacttcaacagcggccgcagcacgccggcctcggtgcgcaagctgacccgcgatcgcgcgctggctatcgctcgcagcaagggcatcgccgcctacaccaacccgggactcaacccggcttatccgaaaggcaccagctgctgcaatgacgccagcgtcttcgacaacgccgggatcccggtgctgtcggtcgaggcgactaactggtcactcggcaaaaaagatggctatcagcagcggagcaaatcggccagtttcccgcagggaaccagttggcatgacgtccagctggataatcagcagtatatcgaccacgcgctgcccgggcgcatcgaacaccgcggacgcgaggtagtgaaagtcatgctgccgctggtgaaagagctggcgaaggtggagaagaaaagctaatacgcacaaaagaacgcgcggtatcgcccgcgtgttctttttgaattatcactcagaggaagagctaacagcttaaccctcgtgcaatccgcactcgcgtttaagcccgaagaaccgggtctcttcttctgccatgcccggctcccatttgcgggtggtgtgggtatcgcctaccgacagatagccctgatcccacagcgggtggtacttcagcccgtgcttttgcaggtactgatacaccgtgcggttatcccagtcgataatcggtagcaccttgaacaccccgcgctgaaccgccagcaccggaagcgtagcccggctgcccgactgctcgcggcgcagaccggcaaaccacgtctgcgcgttgagctctttcagcgcccggttcatcggctcaaccttgttgatctcattgtatttctcaatgccctcaacgccctgctcccacagcttgccgtagcgcgcctcctgccaggccgcgctttcagccgcgcggtagaccttcaggttcagcttgagcttgtccgtcagctcgtcaataaactgataggtttccgggaacaggtagccggtatcggtgaggatcaccggaatatccgggcggatctgattcaccagatgcaaactgaccgccgcctgaatgccaaagctcgacgacagcacatagtttcccggcagattttccagcgcccacgccacacgcccttcggcgtcaagcttttccagttgggcgttggtttccgcgagtgccagaatgcgttccactttcggcaatgcattaagcgcgtttagatcgagtacggacatatgaacctcgtttgcctgttttgccggacgacactgcgttcgtccggcctacgggtttcgctggcccggatcgctacgcgccaccgggcaccaggatgttattcccagaaatcgcgggctgggtcgagcaccgggcgaatgatgcccgcacgcaccgtaaaatcgccgaagccttcacccgcttcgcgctctttcgcccagcgccctaccagttcgtctagcgagtcgagaatttccgactcggtaatattctcacggtacatccgcgggatgcgggtgccgttgcggttaccgccgatgtgcaggttatagcggcccggcgctttgcccaccagtcccacttccgccagcatcgcgcggccgcagccgttcgggcagccggtgacgcgggtgacgatatgctcatcgctcacgccgtgcttgctcatcaccccttccaccttgtcgataaacgacggcaggaaacgctcggcttccgccatcgccagcggacaggtcgggaaggagacgcaggccatcgagttttcgcgctgcggggtgacggcattcatcaggccatgatcccgcgcgagcttctcgatccgcgccttctgatcttccggtacgctggcgacaatcaggttctggttagcggtgatgcggaattcgccttgatggaccttagcaatctccagcaggccagtcttcagcggacgacccggataatcgagaatgcggccgttttcaataaacagcgtcaggtgccacttatcatcaatccccttcacccagccgatgcgatcgccgcggccggtaaattcgtacgggcggatcggctcaaacttaatgcctgcccggcgctccacttccgctttgaaggtttcgataccgacgcgctcaagggtgtacttggttttcgcattcttacggtcggtacggttgccccagtcgcgctgggtggtcacaaccgcttccgccaccgccagcgtatgctccagcggcagataaccgaattcgctcgccgtgcgggcgtaggtttttttgttaccatgttcgatagagagaccgccgcccaccagcaggttaaagcctaccagcttgccattttcggcaatcgccacgaagttcatgtcgttagcgtgcagatcgatatcgttctgcggcgggatcaccaccgtggttttaaacttacgcggcagataggtctggccgaggatcggctcttcgtcggtagtggcgacctttttctgatccagccagatctcggcataagcgcgggtacgcggcagcagatgctcagagatctttttcgcccactcgtaggcctcagcgtgcagctgcgactcgtaggggttggaggtgcacagcacgttacggttcatatcgttggcggtggccagcgcgtccagccccaccgagtgcagcatctgatgcaccggcttgacgttctttttcagaatgccgtggaactgaaaggtctgccggttggtcaggcgaatactgccgtaaatggtgttctcagcggcaaacttatcgatcgccttccactgggtggtggtgatcaccccgcccggcagacggcagcggagcagcatcgcatgacgcggctccagcttctgggcggcgcgctccgcgcggatatcgcgatcgtcctgctggtacatgccgtggaaacggatcagcaggaagttatcgcctttaaaaccgccggtcagaccgtcgtttaaatcttccgcaatggtgccgcgcaggtagttgctctcaagcttcatgcgctcggcatcgctcagtttaccttcgaccactaaaggccccggatgtttttcgctcattagtagacatctcgctgataacggcgctcaacgcgcagctcacttaaaaattcgtccgccgcttcggcgtccatcgcgccgtattcggcaatcacttccagtaaggtgttttccacgtccttcgccatacgattggcgtcgccgcagacataaatgtgggcgccgtcattgatccagcgccacagctcggccccctgctcgcgcagtttgtcctgcacatagattttttgttgttgatcgcgggaccaggccagatcgatacgggtcagcagaccttccttcacatagctctgccactccacctgatagaggaaatcttcggtgaagtgcgggttgccgaagaacaaccagttcttgccttgcgctccgtccgcagcgcgctgctgcataaaggcgcggaacggcgcaataccggtgcccgggccaatcatgatcaccggggtctccgggttggctggcagacgaaagttgtcgttgtgttcgataaagacacggacttcgccatcctcttccacgcggtcggcgaggaagctggaggcgccgccagcccgggcgcggccttcaatttcatagcgcaccacgcctacggtgacatgcacctcgctctccacttccgcctgtgaggaagcaatagaatacaggcgcggcgtcagcggacgcagcagaccgattaacgcctcggcgtccagctgcgccggagagaaacggaccatatcgacgatcggcgtcgcggcggcatactgctgcaactgagctttatcgcccaccagcggcagcagcgattcgctgcgcgtcagggtggcgtagttttcaacgatagtcgcggtgttaaccgtcagctcaaaatgccactgcagggcttccgacagcggcagagttttgccctcaacggtcaccggctcgtcgcctttcagccacagcagctccaccagctctttcaccagctgaggatcgttctggtaccagacgcccagggcgtcgcccggctgatagcgcagaccggaatcaccgaggtctatttcgatatggcgcacatctttttctgaattgcggccggtgattttctgattgaccgacagggtcgccgtcaggggcgcttctttggtatatgggctggtgtgaatatcattcaccgcgccgctggtggccagctgagcgggcgcagcgaccggcgcacgggccttcagcgcctcaaccacgcgcgcgcgccattcagcggccgcggcctgatattcaacgtcggcatcgacgcgatcgagcagacgttccgcgccgagctcggccagcttgttgtcgaaatctttgccggactggcagaaaaattcataagaggtatcgccgagaccaaagacggcgaacgcggtcccgtccagcttcggcgctttcttagagaacaggaacttatgcaatgcgaccgcttcttccggcggctctccttccccctgggtggacgttacaaccaccagcagtttttccgcagcaatttgtttgaatttataatcgcctgcattcaccagcttcacgttcagcttcgccgccagcagatcgtcacgcagcgcttcggcgacgcggcgggcgttgccggtttgcgaggcggaaatcagcgtgatcgtcggtacctcggcggccggggcgggggcggctaccgccgcgccggactgctgattcagcacgccccagaaatagccagatacccaggcgagctgagtgggcgtgaagtcagtggtggccgcctgaaggcgcgccagttgctccgggttgagcggcagcaagttggaaggtggggcctgtgtcgtcatgcgtcgtttgttccagtaagcaaagctgttattcgcaccctgtcagcgcgacaaaaacagaagagaatagaaggttaacggcgggcatagtaacaattaaagaagggatggaaataataaataaccaaatggactaacctgttttagttgtagttattaacaacaaaatcgattaaataagcaattgaaatataagagattaaatcaaataaagcagataaacatgtccattttctgttcacggccgttttagttaatgcgaaaaaatgtactttccggtaccctacggcggtttttttcgtcctgttgagagtcaatgatgtccaccacgctgtttaaagatttcaccttcgaagccgcccaccacctgccgcacgtcccggaaggacacaaatgcggtcgcctgcatggccactcctttatggtgcgtctggagatcaccggtgaagtcgatccccataccgggtggatcatggattttgccgagttgaaggccgcctttaagccgacatacgatcgcctcgaccactattatctgaacgatattcctggtctggaaaaccccaccagcgaagtgctggccaaatggatctgggatgagatgaaaccgcgggtgccgctgctgagcgccgtgatggtcaaagagacctgcaccgccggctgcgtctatcgcggcgagtaagcgaaaaaaagcccggtcagtacgctgccgggcttttttatcaggcaatattcagatacttgtgcgtctgcatagacaggcgccagttgcgggcgatgcaggtgtcgatacacaggcgcgtcgcatcttctttctgactgatcggctgcagggcgatgatccgcggtttgtcatcgctcagcgtttccagcagttcgtccagcgcttctatgtcgcggacgcgccctaccggatgcttgatctcatccgcccgctgcagggcctgagacagcacgtcatagccaccgcgcatgttgaccttcggggaaaccgtcacccaggtattggggctgcagcgtacttcatgggtgccgctggtttcaatctgacagctaaagccgttttgttccagaagcgaggttaacggcgttaaatcatgaatgcagggctcaccgccggtaatgaccacgtggcgggcagtccacccctgccgcccaataatcgccagcagatcctcgctgcttgccgggccccacttgtcgctctctttggttttcgccaggatgctgaacaacgacacttcccgatcggccagcttgtcccaggtatgcttggtgtcacaccacgcgcatcctaccgggcatccctgcagacgaataaagatggcaggcacgccggtgaagtaaccctcgccttgcagggtctggaacatctcgttaatcgggtactgcatagtcatctctgtttagggtgataaacgttcattatcgcagatttcgctgcccaggtcttgtcctgcgctgcgatcgcttttttacccctccgtcaatatccgtgtcgggaataatattattgattaaaaaggcaatcttttcttttggcttagtttattagcatgataagaattaaaataaatagcattctgacgcgcggggggaaatatgtaacaaaaaatgttattcctgtcattcaggataaaataaaaggtccaagaaccaaaataaaaaaccttaaaatacagtaacgtacaaactgatacatgaaagagtgaattatctggccgatctgcgagtccaattctatcccccggtaataataaccttaaactggtcttaataaagccctgaccgggccccttttttatttaattgtcgtttacttttgcccgcctagaatcccgcagaccaaccataatgagatagcgtttatgaccacattattaattaccggcgttacggggtttctgggcggtgccgcgttagagaaaatactccatcaggaaacccggttagatctgctgctgctggtacgtgctgatagccccgaggctggcctcgaacgggttaaagagaacatgcgtaagttcaacatcgccgaggagaagctggcgatgttgcgccagcagcatatcctgctgggcgatctcgcctcttcggagcattttcttaacgatccgcgccttgagcaggtcacccatgtcctcaactgcgccgctgtcgcctcatttggcagcaacccgcttatctggaaggttaacgttgagggcacgctgcgcctggcgcaacgtatggcgcaggtgacgggtctgcagcgctttctgcacgtcggtacggcgatgtcatgttcgcctgaaccggattcactggtcgccgaaagcgcggagtttcgggaacgcgctgagcacctggtggaatatacccactcgaagtcgaccatcgagcagctgatgcagcagcagtgccctacgctaccgctggtaattgcccgcccctctatcgtggtgggtcatacccatcacggctgccggccttccagcagtattttctgggtgttcagcatggggctgatgctgcagaaattcatgtgctccatggaggaccgaattgacgttatcccggtggactactgcgccgacgccctgctaatgctgcttaaccagcctctggctcacggcgaggtggtgcatatctctgctggcgaagagaacagcgtgaagtttgccgaaatcgaccgggcgatggctcaggccctggagcaggcgccggtgggggataagtacgcccaggtgagctatgaaacgctggtcaaaatgagacgcgaactgaaagggatatttgggccatgcaatgagcggctgatgctgaaagccatgcgcttatacggcgcattcgccacactgaacgtgcgctttagtaacgacaagctgctgagcatggggatgccaaaaccgccgcgctttaccgattacatcgaccgctgcgtggaaaccacccgcgggttgtcgatccctcagcaaatggccgtcgactttaaataatggccgcaggcgtaaaaaaaatgccagcccgaaggctggcatgattatttcacaaggacaggattaagcctgacctttgatctctttacgaccgttgaacggcgcttgctcacccagcgcttcttcgatacgaatcagctggttgtatttagcaacgcggtcagaacggctcatagaaccagttttgatctggcctgcagcggtaccaacagccaggtcggcaatggtagcgtcttcagtttcgccagaacggtgagagataacagcggtgtagccagcgtctttcgccatcttgatagcagccagagtttcggtcagagaaccgatctggttgaacttgatcaggatggagttagcgatgcctttttcgatgccttctttcaggatcttggtgttggttacgaacaggtcgtcaccaaccagctggattttgtcgcccagtactttggtctggtaagcgaaaccttcccagtcagattcgtccagaccatcttcgatggagacgatcgggtactgtttggtcagctcttccaggaagtgagtgaactcttcagaggtgaatgctttgttgccttcgccagccagaacgtatttaccgtctttgtagaattcagacgccgcgcagtccatcgccagggtgatgtctttgcccagctcgtagcctgcagctttaaccgcttcagcgataacagccagcgcttcggcgttggaacccaggttcggcgcgtagccgccttcgtcaccaacggcagtgttcatgcctttggacttcagcactttcgccaggtgatggaacacttcagaacccatgcgtactgcttctttcagggtcggcgcgccaaccggctgaatcatgaattcctggatgtcgacgttgttgtcagcgtgctcaccgccgttgatgatgttcatcatcggaaccggcatggagtatttgcccggagtgccgttcagttcagcgatgtgcgcgtacagcggcaggcctttggacgcagcagctgctttggcgttcgccagagaaacggccaggatagcgttcgcaccgaagttagatttgttttcagtaccgtccaggtcgatcatgatcttgtcgatgccagcctgatctttagcatctttgcccaggattgcctgagcgatcgggccgtttaccgcagcaacagctttggttacgcctttacccaggaaacgggatttgtcgccatcgcgcagttccagcgcttcgcgggaaccagtagaagcacctgacggagcagctgccataccgacgaaaccaccttccaggtgtacttcggcttcaacagtcgggttaccacgggagtcgatgatttcacgaccgatgactttaacgattttggacattaggttttcctcagtacaagttaaactaaaactccagacaaacaatgcacccggatgggtgcattgccgttcaaactctttttacttcgcctggcgtttctggtactcgctcgcggctttcacaaagccggcaaacagcgggtgtccatcacgcggcgtcgaagtaaactccgggtggaactggcaggccacaaaccacggatggttcggcacttcgatgatctcgaccaactgatcatccccggaacggcccgcaacgcgcagaccggcagcttcaatcgatttcaacaacatgttgttgacttcgtagcggtgacgatgacgctcggtgatggtcggctcgccgtaaagctggcgtaccagagaatcatcactcagctggcactgctgcgcgcccaggcgcatggtgccgcccagatcgctcttctcagagcggacttcaacgttgccatcttcgtcacgccattcggtaatcagggccacgaccgggtatttacagtctggcacaaattccgtcgagttggcgttttccatacccgctacgttacgcgcgaactcaatcagcgcaacctgcatacccaggcagatgcccagataaggaatattgttttcacgcgcatagcgcgcggtggcgatcttgccttcaacgccgcggtagccgaagccgcccgggatcaggatagcgtctaaatccttgaggatttcgacgccgcgcgtttccacatcctgcgaatcgatcagcttgatgttgacggtaacgcgatttttcagaccgccgtgtttcagcgcttcaatcaccgacttgtaggcatccggcagttcaatgtacttaccgaccataccgatggtgacttcgcctgccggattagcttcttcatagattacctgttcccattcggccaggtttgcttccggacaagttaagctgaatcgtttacaaatataatcgtccagcccctgagatttcaacaggcccggaattttataaatggaatcgacatctttcagagaaatcacagccttttccggaacgttacagaacaaagcaattttggctcgttcgttggccggaaccgcgcgatcggagcggcagatcagaatatcaggctgaataccgatggagagcagctctttcacggagtgctgggtcggcttggttttgacttcgcccgcggcggccatgtacggcaccagagtcaggtgcatgaacagggtatgctcgcggccgatctctaccgccatctgacgaatcgcttcgaggaacggcagggattcgatatcgcctacggtaccgccgatttccaccagcacgacgtcatggccttcgccgcccgccagtacgcgctctttgatagcgttggtgatgtgcgggataacctgaacggtcgcgcccaggtagtcgccacggcgctctttgcgcagcacgtcggagtagatacggccggtggtgaagttattgcggcgcgtcatcttggtgcggataaaacgctcatagtggcccaggtccagatcggtttctgcgccgtcttcagtaacgaacacttccccatgctggattgggctcatggtgcccggatcgacgttgatatacggatccagtttcatgatggtcacgttgagaccacgggcttcaagaatggctgccagggaggctgcggcaatgcctttacccagagaggatacgaccccgccggtcacaaaaatatagttcgttgtcatgctgaacctgagaagttagggtaaaacgatggaataaccaggacgggaaagtagtatacccgaacatgcgtgacgccacaaactttcattcttcccctccccttcgttcttcaagttgcacctgtgttgcgactcgaacaactcgaagaggcaggctacatggtgtttcaacgacataacggaaagagaaaatagacgcttttggcgaaatgtttttgacgtaaatcaagcgcttgttatttataaaatcacacaaatcgcgcttgatcacgaaaatccgttagagatcagtttcctggcgttttacttcctgccacacttcttccatggtatcgaggtcgacgccggtcatttccaggcctcgggcggcgacaatacgctcgacctcgcggaagcgacgctcaaatttgaggtttgctttctgcagcgccacctcggctttgacgcccaaatgacgggataagttcaccgtggcaaacagcagatcgcccacttcctcttccagttttgcttcatccaccaccgcctgctgcgcttcatgcatcacttcatcaatttcttcatgcactttgtcgagcaccgggcccagcgaggtccagtcgaaacccactgccgagcagcggcgctggattttatgcgcgcgcatcagcgccggcaggctatggggaatatcgtccagtgccgaatgctgggctttttccgcccgctccgcgcttttgatttgctcccagcgggccaggacttccgtgctattgcccgccgatgcctcgccgaagatatgcgggtggcgacgctccagcttgtcgctgatggcggcgcagatatcgtcaaagttaaagcgtccctcttcctgcgccatttgcgcatagaacaccacctggaacagcagatcgcccagttcaccgcgcagatcgtcaaaatcttcccgctggatagcatcgaggacctcgtaggtctcctcaagggtgtaaggggcgatagtggcaaaggtctgctctttatcccatgggcagccgttttccgggtcgcgcaggcggcgcatgatgccgagcaagcggtcaatttgagtcatgtgacaatcctggaaatttaaaaaatagtcggccggataaggcgtttagaccttatccgacgttgcgaaattgccggatggcggcttcgccttatccggcctacagacgaattaaccgccgtgtagacggcgcgcgtcgatcacatccggcacctggttgagcttaccgagcacccggcccagcacctgcaggttgtaaatctcgatggtcatatcgatggttgccagctgctgacgggtatcgctgcggctggcgacgcccagcacattcaccttctcattggcgaggatggtagtgatatcgcgcagtaaaccgctgcgatcgttcgcctccactctgaccaccagcgagtagcccgccgagtagctttcgccccataccgcatcgacgatgcgctccggggcatgcgactgcagttcagccagctgatcgcagtccgcgcgatgcacggagatcccgcgcccctgggtgataaagccgacgatctcgtcgcccgggattggctggcagcagcgggcaatatggtgcatcaggttgcctaccccttccaccactacccggccattgtccttggtgcgattttgcggcgtgtaggttttctgctgcagttgcttcagcgcggccgcatcctgctcggcggcgctaggtttattgaactgcgcctgcaggaagttgaccatctggttgagacggatatcgccaccgccgatggcggccagcagttcatcgagctcgttgaagttatagcgcggcagcaggtgcttttccgcatccttcaggctgatgcccaaatgctccagctcgtcgtcgaggatctgccgaccggcgagaatgttcttgtcgcgatcctgcttacggaaccaggcgtggatcttcgaacgtccgcggctggtggtcacatagccgaggttagggttcagccagtcacggctcgggttcggctgcttctgggtaataatttcgatctgatcgcccatctgcagctggtaggtgaatggcacgatgcggccgccaattttggcgccgatgcagcgatggccgacatcgctgtgaatatgataggcaaagtcgagcggcgtcgaccccgcaggcaggtccaccacgtcgcctttcggcgtaaagacatacacccggtcgtcgaagacctggctgcgcacttcatcgagcatctcgccggagtcggccatctcttcctgccaggcaatcagcttacgcagccaggcgatacggtcttcatagccgcggccgccgctggtgccggctcccgcgccctctttgtacttccagtgcgcggccacgcccagctcggcgtcttcatgcatctgccgggtgcggatctgaatctccaccgtcttgccgctcggccccagcaccacggtatgaatagactggtaaccgttgggtttcgggttggccacgtagtcgtcgaattcatccggcagatggcggtagtgagtatggacgatccccagcgcggcatagcaatcctgcaaacgctcagccacaatacgcaccgcgcgaacgtcaaacagctcgtcgaaagcgaggtgttttttctgcattttgcgccagatactgtagatatgcttcggccggccatagacttccgccttgacgccttcggctttcatctctgagcgcaggtggccgacaaactcttcgatgtaatgctcgcggtcgatacggcgctcgtggagcagtttggcaatgcgcttgtattccgccggatgcagatagcggaagcagtaatcttccagctcccacttcagctggccgatacctaagcggttcgccaggggagcatagatattggtgcactctttcgccgcaagaacgcgctcatcttccggcgcgtccttgacctcgcgcagatgcgcgatccgctcagcaagtttgatgaccacgcagcggaaatcgtcaaccatcgccagcagcatacggcgaatgttatccacctgctcggaagagaccgagtcggtatgggtagccttcagctggcggatagcggccatgtcccgcaccccgtgaatcagggtcacgaccgatttacctacgctctcctgcatcacctcttcgctgacaacttcgccgtcggccagcgggaacagcagcgccgcgcgcagcgtatcgatgtccatacttagggtggagaggatctccaccatttcgacgccccgccacagcagcaggtccgcctgcgggtgtccttgcgttttttcgcgacaataatcccaggtttcggctaagcgctcacacgactgctggctggaaattcccagactcgcgatccatttcttcgggtcaaattcaccagctttattaagatgtgcacttcttaccgcaaccattgtcctctccttaagggaccggcctgccgaagtcggcaagcctcaactttctacatgtcatcctgcaggtcgcgtcagcattcatggccagggtggctcttctgcgacgttgtgaatgaccttatgtaagcctgcgctcaaacaacaccattgattccagatggccggtatgcgggaacatatccagcatcgccaggcgttgaatctgatatccagcctgcaacagggtttcgctgtctcgcgccagcgtcgccgggttgcaggaaacatacaccacccgccgcggtgccagttttattatatgcggcatcacgcccggcgcgccggcgcgggccgggtccagcagcactttatcaaagccgtgcttcgcccaggcctgacgggtgacgtcttcttccagattttcatggaagaaagtgacatttgataaaccattgcgggcggcgttttcccgccccttctccaccagcgccggcaccccttccacgcccaccacatgggcggcgcgtgtcgccagcggcagggtaaagttgcccatcccgcagaatagatccagcacccggtcctctggccgcagatccagccactccagtgcggtacgcaccatctgctgatttacgccgtcgttgacctggataaaatcccgcgggctgaacactaagcgtagtccgtctgaggtataccatggcgcttcgccatgaatatgctccagtatctcgctttgtggcgcgaggtacagggaaagaccgtgagtttgcgaaaagcgttccagtttttccctgtctgtcgccggcagggctgcggtatggcgcagcaccatcagcgggccattgtccgcctgcaccagctcgacgtggccgagatggcgtaatgcgctcagcgcgcttaagcactcgcgcacagcgggcagcaatgcctcaagttggggcaccaaaacagggcactgcaccacatcgacgatcgctttggcgttggcctggcgaaaacccatctgcaattgttgggtcttcggctgataattcaagctcaagcgtgcgcgacggcggtagccccacggcgcgccggcgatgacgtcatctacctcgcgcttcatcagtcgccccagcgcggcgcgtttactttgctgctgaagcggaacgctggcatgttgttgttggcatccgccgcagacgccaaaatgggggcagcgcggcgcctggcgctgcgggctgtcggtcagtcggcgtttcacctcggcgcgggcgtactgttttttatcttccaccagcgccacctcggcctgctcgtggggcagcacgccgctcacgaacagcgccttcccctggtggcgggcaacaccctgaccaaagggatcgaggtcgttgactgtaacggttatgatctggcgcgtcgtcacacgccgttttgcagagtagaattgcgccatcgtagagagttgtctcaatcaaataaaacgagctcgttcagagcggcagcgccgcgaggcgcagcgacgctgcacagaacgatgatgtctatattctcccataatggaaccgcatgaccaactacagcctgcgtgctcgcatgatgattctgattctggcgccaaccgtcctgataggactgttgctcagtattttctttgtcgctcatcgttataacgacctgcaacgccagctggaggacgctggcgccagtattatcgaaccgctggcggtctccagcgaatatggcatgaacttgcaaaaccgcgaatccatcggccagctgatcagcgttctgcatcgtcgccactcggagatcgtgcgggccatctcggtgtacgattcgcataaccgcttatttgtcacctccaattaccagctcaatcccagcgaactgcagatcccgaaaggcgaggcattcccccgtcacctcagcgtcatccgcgatggcgacatgatgatcctgcgcacgcctattgtctcggaaagctattctccggatgaatcacccgaatctgacgctaaaatgccgggcaatatgctgggctacgtcgccctggagctggatctaaaatcggttcgcctccagcagtacaaagagatttttatctccagcgtaatgatgctgttctgtatcggcatcgcgttaatcttcggctggaggctgatgcgcgacgtcaccgggccaatccgcaatatggttaacactgtcgaccgcatccgccgcggacagctggacagccgggtcgaaggctttatgctcggcgaactggatatgctgaaaaatggcattaactcgatggccatgtcgctggcggcataccacgaagagatgcaacacaacgtcgaccaggcgacctccgatctacgggaaacgcttgagcagatggagatccagaacgtcgagctggacctggcgaaaaagcgcgcccaggaggcggcgcgcattaagtctgagttcctggccaatatgtctcacgagctgcgcactccgctcaatggggtgatcggctttacccgcctgacgctgaaaaccgatctcaacgctacgcagcgcgaccacctgaccaccatcgaacgttcggccaacaatctgctggcgatcatcaatgacgtgctcgacttttccaagctggaagccgggaagctgatcctggagagtattccgttcctgctgcgcacttcgcttgatgaagtggtcaccctgctggcgcattccgcgcacgataaagggctggagctgacgctgaatattaagaacaatgtaccggacaacgttatcggcgacccgctgcgtctgcagcagattgtgaccaacctcgtgggcaacgccatcaaatttaccgagcacggcaatatcgacgtactggtggagcagcgggccatcagtaattcccgggtacagatcgaaattcagatccacgataccggcatcggcatccccgagcgcgaccagtcccggctattccaggccttccgtcaggccgatgccagtatttcacgccgccacggcggcaccgggctcgggctggtgatcactcagcgtctggtcaaagagatgggcggggatatttcgttccacagccagccgaaccgcggctccaccttctggttccatatcagcctcgatctcaacccgaacgccattccggatacgctgaacaccgacgggcttgtcggcaaacgtctggcctatgtggaagccaacgcgacggcggcgcagtgtaccctggagatgctggccgctacgccgctggaggttatctacagccctaccttctcctcgctggcggaagcgcagtatgacattctgctggtcggtatcccggtttcaatgcgcgatttgtcgccgcatcgggaaaaattagccaaagcctgcgcgatgtccgataacgtactgctggccctgccgtgccatgcccaggtcagcgccgaagccctgaagcgcgacggcgttgccgcctgcctgttaaagccgctcaccaccacccgtctgctaccggcgctggtggctaccagccacgcgcttgcctccgcgccgctgatgcagatcgacagtcataagttgccaatgacggtaatggccgtcgacgacaacccggctaacctgaagctgattggcgccctgctggatgatcttgtgcagcaggtgatcctctgcgacagcggccagcaggcggtggacaaggccaagcagctgcagatggatctgatcctgatggatattcagatgccggatatggacggcatccgcgcctgtgagcttatccatcacctgtcccatcatcagcaaaccccggttattgcggtcaccgcgcacgccctggagggccagcgtgagaaattactgagcgccggcatgaacgactatctggcgaagccaatcgaagaagagaaactgcacgcactgctgttgcgctatcagcccggcctgcacagcgtcgttccggcgtcgctaccgcccgcagagccgatcgtcgatcataatcaaacgctcgactggcaactggcgctgcgccaggcggccatgaagccggacctggcgcgggagatgctgcaaatgctgatcgcctttatgccggaggtgcgtaacaaagttgaggagcagctggtgggcgagcagccggaagggctggtggatctgatccataaactgcacggcagctgcagctatagcggcgtgccgcggctgaaaaagctgtgccataccctggaaagtcagctgcgggcaggcaccgccgccgaggatctggagccggagctgcttgagctgttagatgagatggataatgtggcccgcgaagcgtgccggatgggggtgtaaaccccggatagcggcgctacgcgcctcatccggcctacgccctacggtccggtattcggttggtagccccggtaagcgtaagcgccaccggggatggttcccggatcgcggtgctacgcaccttatccggactacaaataccactgcgccagccgggttaccgcctgtcgcccatctgcaaaaccgcggctacgttacgcgccgtcattcgcaggttggcggcggcattggccaacgcttcatcaagggtacagatggtatacaacacgctgaataccgcatccagcccgtgctgatgcacgacgccaacatcggcggtaagactgccggcaatcccgatcaccgggacgttaaaacgcttcgccaccctcgccacccccaccggcactttgccgtggatcgtctggctatcgatacgcccttcgccggtgatcactaaatcggcatccgccacccgctcagccagctgtagcgcatcggtgacaatctcaatgcccggacgcaactgagcaccacagaacgcatacagcgccgcacccatgccgcccgccgcgccgccgccctcaaggctcagcacgtcgatatctaaatcgcgggcgataatccgggcatagtgccgtaggccgctatcgagccggtcgatcatctgcgccgtcgcccctttttgcgggccgaacaccgcgctggcgccctgcgggccggtcaacgggttggtgacgtcgcaggcaacgtcaatccggcaatctgccagccgcgaatcgagttcgctgagatcgattcgcgccagcgtctccagcgcgccgcccccggaggcaatttgctggccctcggcggtcagcagtttcgcccccagcgcctgcgccatcccggcgccgccgtcattggtcgcactgccgccaataccaataatgatctgtcttaccccggcgtccagcgcatggcggataagctccccggtaccccaggaagtggtcagcagcgggttacgctgcgccggcgggacgctctccaggccgctggccgccgccatttcgataaaggcgcactggcgatcgccggacagcccgtaaaatgcctcaaccggctcgcccagcggcccggtgaccgtcagcggaaccagaagcccgccggtcgccgccaccatggcttccaccgtcccttccccaccatcggcaaccggcagcttgacgtactcggcgtcaggataaatctcgcgaaagccttgctctatcgcactggccacttccagcgcgctcaggctctccttccaggaatccggtgcgatcactattttcatctgctgtccttactctgagccaacccctggcgctgtcgcgcaatgccggcccccgcagaggccggcggacttttagcgcaccatgcatggacgcttgttgtcaaaggtccagcccgggatcagatactgcatcgccatcgcatcgtcgcgggcgccaagaccatgtttcttatatagctcatttgcctgcatcacgcggtccatatccagctcaacccccaggcccggggtactcggtacctgcaccatgccgcctttgatttcaaaaggttgtttggtcagacgctggttgccctcctgccagatccagtgggtatcgatagcggtgatcttgcccggcgccgctgccgcgacgtgggtgaacatcgccagcgacacgtcgaagtgattattagagtgcgaaccccaggtcaggccgaactcatggcacatctgcgccacacgcaccgacccctgcatggtccagaagtgcgggtccgccagcgggatatccaccgattgtagcgacagcgtatggcccatctgccgccagtcggtggcgatcatattggtggcggtcggcaggcccgtcgcgcggcggaactcggccatcacttcgcggccggagaagccctgttcggcgccgcacggatcttccgcataggccagcacgcccttcagctgtttaccaatctgaatggcctcctcaagcagccaggcgccattcgggtcgagagtgacgcgagcattcgggaagcgcttcgccagggcgctgatcgcttcggcttcttcaaaaccggccagcacgccgcccttcagcttaaagtcgttgaaaccatatttttcatacgccgcttccgccaggcggaccaccgcatccggcgtcatcgcctcttcatggcgcaggcgataccactcgcactgctcatccggctggctctgataggccagcggcgtcgcatggcgattaccgacaaagaacagatagcccagcatttcgacttcgctgcgctgctggccatcgcctagcagcgaggcgacgttgaccccaaggtgctggcccagcagatccagcagtgccgcttcgatgccggtcaccacgtgaatggtggtgcgcaggtcaaaggtctgcaggccgcggcccccggcgtcgcggtcggcaaactgattgcgcaccgcgcccagcacgtttttatactcgcccagcgttttgcccaccaccagcggaatggcatcctccagggtctggcgaattttttcaccgcccgggatttcaccgacgccggtatggccggcgttatctttgataattacgatattgcgggtgaagtacggggcgtgcgcgccgctcaggttcatcagcatgctgtcatggccggcaaccgggatcacctgcatggtggtgacaacgggcgttgaagagaaagtcgtcatagcatcatcctttttaattagtggcggccgaaaacgggacgtttgcggtcgaatgtccagccggggatcaggtactgcatcgggcccgcgtcgttgcgcgcgccgcccggcagcgctttataggcctcatgggctctgcgcacctgctcccagtcaagttccacgccgagtcccggcgcgtctggcacggcaatgctgccgttaataatctgcagcggatttttggtcaggcgcgcgtcgccctcctgccagatccagtgggtatcgatggcggtggggttgcccggcgcggcggcgccgacgtgggtaaacatcgccagggaaatatcaaagtggttgttggaatggcagccccaggtgagcccccagtcgtcgcacagctgcgccacccgcaccgcgccggagagcgtccagaagtgcgggtccgccagcgggatatcgacggcgttgagcatcaccgcatggcccatttcgcgccagttagtggctatcatattggtggcgaccggcagcccggtggcgcggcggaactcggccatcacctcccggccggagaaaccctgctcggcgccgcacggatcttcggcgtaggtcagaacatcctgcagccctttacacagcgcgatggcctcatccagcagccaggcgccgttagggtcgacggtgatgcgcgcatccgggaaacgctttttcagcgcccgcgcggtgtcaatctcctgctcgccgggcagcacgccgcctttgagcttaaagtctttgaaaccgtagcgatcctgggcggcttccgccagacgcactatcgcctcgctgctcaacgcctgctggtggcgcaggcggtaccattcgtgatcgcccggcgtatggtccagataaccaaggtcggttttctgccgatcgccgatatagaacaggtagcccagcacggtgacggcatcacgctgcttacccgggcccagcagctcgcagaccggcacattaagcacctggccgagcaggtcgagcagcgccgcttccagcgccgccaccgcgttaaccttcagttcgaaggtccacgcccctttgccgaaggtgtcgaaatccgccgcctgattgcctttgtgcacctgctgcaccacgcgattgagtcgggcgacctcctggcccaccacctgcgggatcgccgccagcagcgtctggtagatgacctctccgccgggcgcttcgccgacgccggtatggccggcgttatcggttaacaccacgatattgcgggtaaaccaggcgttatgcgctccgccgatgttcagcagcatgctgtcgtgcccggccaccggaatgaccttcatctctgtgataatcgggctggattgagtagtcatgattaacgtcccgctacaggtttcagttcgatacgtttgatatcgcccaccagcaccagatagctcagcaccgccaccagggcatggataccgacgtagatcagcgcgccgttgaacgagccggtggtgccgacgatatagccgatggcgattggggtgacgatgccggagatattgccgaacatattgaacagaccgccggagagaccgctaatctctttcggcgcggtatccgccatcaccgcccagccgagggcgccgatccctttgccgaagaaggccattgccataaagccgatcaccatccactccacgttgacatagttacacatcagcatggtcatggagagcagcatccccagcacaatcggcgttttgcgcgcaatgttcagcgagccggtgcggcgcattaaccagtcggagatcaccccgcccagcaccccgccgacaaagccgcacaccgccggaatggaggcgacaaagccggctttgaggatcgacatgccgcgcgcctgcaccagataaaccgggaaccaggtgataaagaagtaggttaaggcgttgatgcagtactgaccgatatagatgccgatcatcatccgcgagccgatcagttgcttgatctgccccattttgacgctaaacggcactttctgcgcgctgctcttctgatccatgttgatcagcgccccgccttcggcgatatagtccagctctttctggttcacgcccgggtggttgttcggatcgtggatcactttcagccacacaaagctgatcacaatccccagcccgcccataaagaagaacacatgcgaccaacccacctcatgcgtcagccagcccatgatcggcgcgaaaataacggtggcaaagtactgggcggagttaaaaatcgataccgctgtccccctctcctgcgccgggaaccaggcggcgacgatccggctgttgccggggaatgacggcgactcggcaaggccgacgaggaagcgcagggtaaacagcgcaacgataatgccaaagccgctgaagatatcgacgaagccctgcagcagggtaaacatcgaccagatgaagatcgaccagaaatagacgcgcttcgagccgaagcggtcgagcagccagccgcccgggatctggccgatgacataagcccatgagaaggcggagaacacataccccatccccaccggatcaaggccgatatccctggccatttccgaaccggcgatcgacagcgtcgcccggtcgccatagttaaaagaggtgacgataaacagcatcaccactatccagtagcgggcgttggtgcgcttttcagccgccgtcgccgcctgacttaatgaactcattgttgtactcctgaatcatagcgtttagctacgttcattctgaacagcacaacctgtagggtaatcagaatgacgtggtcgtgttttgatagttgtcgttatatctggcactgcatttatcactggctggagcagtatatgaagaggcacaccgcggctcaccgtgcatccacacagcttttacgccgctattgcaggtggtttgtggcgaatgcctgaaagaatggggggaagttcacggaaatgaaaagccagcgccgctggcgccgcatagcgcagcaaaaagggccggagtgtgaaatacctcacttgacccggtgaaactggctggcttaagccatgatattgttaaggatattgtggcgtttgcctaaaggcgtggcgcctggaaagcgctactattttgacgtccgcgtatctggccgcgacgtattgaaagagcgccctctgcgtagggagagggcagcgcttttatgcgagcagggtggcccactgctcaacccacggattggagacgctctccggctccgggtcttcgctggcgtcaatcttcagcatctcgccgatgcgcttcgcgccctgctcctgcagcagctgatcgaacttcaggccgccgccgcaaaagttggcataggtgctgtcgccgagcgcgataatgccgtaccgcaggtgaggctgatacatatctttgatgccctcatacagcgggacgatgctgtccggcaggtcgccctgcccggtggtggaggtgaccaccagcacatacttacccgtgtaggattcccagtcgttgacctgcggatcctcatacacggtagccttgtgtcccagtccgctgaggatcgcttccgcttcttccgcgaccagcagcgagttgccgtacatggtgccgacaaaaattccgacttccgccatgctattatctccctggattgaccttattctcttcatcctgaccgctgtcgtcggcaaactcaaccctttcatttagcgggagaagcccgcgccagccaaactgcgacagcgcgcgcatccagacgtcgtcaaaaccggcgcgcagggtcagcggctcgccggtaaaaggatgggttaacgacagctcgctggcgtgcagcatcaggcggtgacagccgaaatgttccgcggcgctgcggttttgccgcagatcgccgtgcttgctgtcgccgaggatcggatgacggaggtgggccagatgacggcgcagctggtgcttgcggccggttttcggctccagttccaccagcccatagcgcgaggtgggatagcgcccagtcgccactggcatctccactgtcgccagaccgcggtagtgggttaccgctggctgcggccctttatcttcgcgggcgaacttatcggcgattctatccagctcctctaccagcgggtaatccagcagcgcctcttccatcagccagccgcggacgatcgcatggtagcgcttccggatctggtgctgctcgaactgttgcgccagcagccggcccgcctcgctcgacaatcccatcagcagcacgccggaggtgggccggtcgagacgatgagcggtaaaaacgtgctgaccgatctggtcgcgcacggtctgcatcaccaccactttctcgtcgcgatcgagccagctgcgatgcaccagccagcccgagggtttgttgaccgccaccagccagtcgtcctggtagataatctccagcatcaggcctgctcaccggcaaacagcgcgtctaacagcagaagttccgccagcatggattcgcggaccgggtgggcctgatccagagccatttcgtaataaggcgcaacggcaaaattttgcggcagcggctggccgctctccagcagctggtgcatacgcgggatcaggacccactgcagccactccagcggctccagggtatccaggcaaaacggcttatcgctggcgaaggcgctgctgtccggcgccgtctcctgccagtgctccgtttcgcgcagcagggcttcaatggcgcgcaggcgatcgcgcacgctatcgtgaagagtcatggggaaacctcgatgagttaaaaaccgggcgcaggatagcaaatccgcaggagaaataaaaaaagggagcactgtataaacagtgctcccggttcgttttgcagcagtcccgctacattggtgctccctgctcgtccttgaaaacttttcctgaggtctcctgaccatgttcatccataaacacgtgcatcctgctttcacaccaccccgatgcgaaatgacttatccataagtttgtcccgatcttcctgatccaccgttcatcctgagcggctctcgttctccatcctggaggtgtccattacgcgatcctgcgttatccttgcttcatcctgaagcctgtccctgcaacgccgtcctggcgggtcctgcagaagcgccatcatcctgatgttcgcttcatttcgcgacgtcctgtcgacagacataggatcactgattctgccccttcttacaacccttcttgagacaatctcttaagattagtccccactcaaaaggacgaaaaaattaagatctgatttaataccaacaacttatataaaaaagtatggattaaatttaccttaaatgatgacgatctcttacaggttttgtaagagatctctcacaaacgatctggcagactggattacagaactggctcaaggtggttgaggaaacccgcaagtgagggagaaagcgtaatgcgtttggcggtgccgagggtctctttgactacctcgccgctgagattacagacggatatcacatccagttcactctcgagggtggcgatgaacagcgtcggcgacagcttcaaccgcttctgcaccaccaggtgcccgattaaattttcctgcacccgctggaaatcctcttcactccaggtctgcagcagcgtcaaggtttcgccggcaaaccggccggacatatcgccggcaaactgagtggtataataagaatgaagcggctgttgtaccacaatgtcgagggcgcgttcaaccgcgctgatattttgcgccagcgaaaacggctgcggctgccagaaaacggcctcgccctgggtgtcgacaacgcaaggcgacgggacgccgtaaagctcttcactgcgcggcaggctgtggcgctgctgctgccagacggcgcaatatcgttgggtaaaagcgcgtagcgcttctgctgtctgatggtccaccggtttctctcttcacgttagacaggatacactggagcaatagtgtacccgctttactatggtgaaacatgtcttcttacgataataagcaggcgctggccggcctgacgctcggtaaatcaaccgattaccgcgatacctatgacgcctcgctgctgcagggcgtgccgcgcagtttaaaccgcgacccgctgggcctgcatgccgataatctgccgtttcacggcgccgatatctggacgctgtacgaactctcctggctgaacggcaaaggtctgccgcaggtagctgtcggccacgtcgagctgcccgataccagcctcaatctggtggagtcgaaaagctttaagctctatctcaacagctttaaccagacccgtttcgccagctggcaggacgttgcagagaccctgactcgcgatctcagcgcctgcgcgcaggggaaggtgaaggtatcgctctaccgcctggatgaactggaaggccagccgattgcccgcctgcacggcacctgcatcgacgatcaggatatcgagatcgataactatcagttcagcgccgattacctgcagggcgccgccagcggcaaaatcgtggaggagacgctggtcagccacctgctgaagtctaattgccttatcactcatcagccggactggggctcggtgcagatccagtatcggggggcgaaaatcgaccgcgagcagctcctgcgctatctggtttcgttccgccaccataacgaattccatgagcagtgcgtcgaacgtatctttaacgatattctccgtttctgccagccggaatcgctttccgtttacgcccgctatacgcgacgcggcggtctggatatcaacccctggcgcagcaatggcgacttttcccccgccaccggccgcctcgcccgtcaataataaacaatttcacaatttgcgtgcgtttaggcgcgcgcaaggttgtggaaacgccgttcgcagggctattgtaatcacaggaagaccataagcgtcctgtaaggagttcacttgattacacatgttagcccgcttggttcaatggatatgctgtcgcagctggaagtggatatgcttaagcgcaccgccagcagcgacctgtaccaactctttcgcaactgctcgcttgctgtgctcaattcggggagcctgaccgataacagcaaggagctcctgtcccgtttcgaaaatttcgagattaacgtgctgcggcgcgaacgcggcgtgaagctggaactgatcaacccgccggaagacgccttcgttgacgggcggattatccgctccctgcaggccaacctgttcgccgtgctgcgcgatatcctgtttgtttacggccagatccacaataccgttcgcttcccgaacctcgatctcgaaagttcggttcatatcactaacctggtgttctcgatcctgcgcaacgcccgcgcgctgcacgtcggcgaggcgccgaacatgatcgtctgctggggcggccactccatcaacgaaaacgaatatctctacgcccgccgcgtcggtacgcagctgggcctgcgggaactgaatatctgcaccggctgcgggcctggcgcaatggaggcgccgatgaaaggcgccgctgtcggccatgcgcagcagcgctacaaagacagccgctttatcggcatgaccgaaccatccattatcgctgcggaaccaccgaacccgctggtcaatgaactgatcatcatgccggatatcgaaaagcgtctggaggccttcgtacgtatcgcccacgggatcattattttcccgggcggcgtcggcactgccgaagagctgctctacctgctgggtattctgatgcatcccgacaacaaagcgcaggtgctgccgctgatcctcaccgggccgaaggagagcgccgactacttccgtgtactggacgagtttatcacccataccctgggcgaatcggcccgtcgccactaccggatcatcattgacgaccccgcggaagtggcgcggcagatgaaaaaagcgatgccgctggtgaaagagagccgtcgcgagaccgatgacgcctatagctttaactggtcgattcgcatctcgccggacctgcagatgccgtttgatccgacccacgagaacatggccaacctcaaactctccccggatcagccggtggaagtgctggccgccgacctgcgtcgtgccttctccgggattgtcgcggggaacgtcaaagaggtgggcatccaggccattgagcagtacggcccttacaaactgcacggcgatccggagatgatgcgccgtatggacgatctgctgcagggcttcgtcgcccagcaccgcatgaagcttccgggcggcaccgcctatattccttgctacgaaatcatcgcctgatttcccactctcccgccggggcatcgcctgacgcctgcccccggcgggctctcttcctctgacttccagaacgcgctaaaaacctttctgttactaatcaatcacctgaattatttctacatagccaaacgtttgcgttggtaaaaactgcgacaattatcactgcaaaaaatggttttaagcgcaaaaacgtcgactagttctcttttttacagtaaatccctcgttattacgccgctccgcttttatctcatatgctgcaaatggtagccttcgcgccacaaatcgctggctgatcaccagaaacaggctgttggactaaaaatacgcacattgaaagtggattattgcatttgagatcgcgatcactgatgcataaaccatataaatgtatctttccggcccaattattacggagaaaatttctaaaaaaaccgtaattaaacgaatttcatgttacgcaattgtatttattcattagattttgttgattcctccaggagatacagatggaaaccactcaaaccagcaccatcgtttcgggcgaaacccgcagcggatggcgtaaaaccgacaccatgtggatgctgggcctgtacggtacagcgattggcgcgggcgtcttgttcctgccgatcaacgccggcgttggcggcatgatccccctgatcatcatggcgattctggccttcccgatgactttcttcgcccaccgcggcatgacccgcttcgtgctctccgggaaaaacccgggcgaagacatcaccgaagtagtggaagaacacttcggcgtaggcgcaggtaagctgattaccctgctttatttcttcgctatctacccgatcctgctggtttacagcgtggcgatcactaacaccgtcgaaaccttcatggcgcatcagctgcacatgacgccgccgccgcgcgccattctgtcgctgatcctgatcgtcggcatgatgaccattgtgcgtttcggcgagcagatgatcgttaaggcaatgagtgtgctggtgttcccgttcgttatcgcgctgatggtgctggctctgtatctgatcccgcagtggaacggcgcggcgctggagacgctctccctgagcggcgcttccgttaccggcaacggcctgctgatgaccctgtggctggcgatcccggtgatggtcttctccttcaaccactcgccgatcatctcttccttcgcggtagccaaacgtgaagagtacggcgaaggcgctgagaagaaatgctccagtatcctcgctcgcgcccacatcatgatggtgctgaccgtgatgttcttcgtcttcagctgcgttctgagcctctctccggcagacctggcggcggcgaaagagcagaacatctcgattctgtcttacctggcgaaccactttaacgcgccaatcattgcctggatggcaccgatcatcgcgatgatcgccatcaccaaatccttccttggccactatctgggcgctcgcgaaggctttaacggcatggtgattaaatccctgcgcagtaaaggcaaatcgattgaaatcaacaaactgaacaagctgaccgcgctgttcatgctgatcaccacctggattgtggcaaccctgaacccgagcatcctcggtatgatcgagacccttggcggcccgattatcgcgatgatcctgttcctgatgccgatgtatgcgattcagaaagtcccggcgatgcgtaaatacagcggccatatcagcaacgtcttcgtggtgattatgggcctgattgccatctccgcgatcttctactctctgttcagctaattcattcaacgcctccccccgcgccgctttacggcggcgcgctttccgacagcacgggaatacatatgatcagcgtattcgatatctttaaaatcggcattggcccttccagctcccataccgttggaccgatgaaagcgggcaaacaattcactgacgacctgatcgcgcgcggcctgctggccgaggtgagcaaagtcgtcgtcgacgtctacggctccctctccctgaccggtaaaggccaccataccgatatcgcgattatcatgggactcgccggcaacctgccggacaccgtcgacatcgacgccattccgggctttattcaggatgttaatacccatggccgcctgatgctggccaacggtcagcacgaagtggacttcccggtggatcagtgcatgaatttccatgccgacaacctgtcgctgcatgagaacggcatgcgtatcaccgccctggccggcgacaaggtgctctacagccagacgtattactctatcggcggcggctttatcgttgatgaggagcacttcggccagactaccgaggcgccggttgccgttccttacccttacaaaaacgccgccgacctgcagcgtcactgccgtgaaaccgggctgtcgctctccggcctgatgatgcagaacgaactggcgctgcacagcaaagaagcccttgagcaacacttcgccgcggtgtgggaagtgatgagcgccggtatcgagcgcggcatcaccaccgaaggcgtcctgccgggcaaactgcgcgtcccgcgccgcgccgccgcgctgcgccgtatgctggtgagccaggacaccaccaacagcgatccgatggcggtggtcgactggatcaatatgttcgccctggcggtgaacgaagagaacgccgccggcggccgggtggtgaccgcgccaaccaacggcgcctgcggtatcgtgccggcggtgctggcctactatgacaagtttatccgcaaggtgaacagcaactccctggcccgctatatgctggtcgccagcgcgattggttcgctgtataagatgaacgcctccatctccggcgccgaagtcggctgccagggtgaagtgggggtcgcctgctcgatggcggcggccggtctggcggaactgctgggcggcagcccgggtcaggtgtgcatcgcggcagagatcgctatggagcataacctcggcctgacctgcgacccggtcgccggccaggtgcaggtgccgtgcatcgaacgcaacgctatcgctgccgtgaaagcggtcaacgccgcgcgaatggcgctgcgccggaccagcgagccgcgcgtgtgtctcgataaagtgatcgagaccatgtacgaaaccggcaaagacatgaacgccaagtaccgggaaacctcccgcggtggtctggcgatgaagattgttgcctgcgattaacctgctggcccgccacgcgtcggcgtgtcgggccatcgtcctgcataactctttttgttatatcaataaaattttagttatttaatggttataagcgctgtttgttaccttacgcaaaaccgctaaggagaacagacaatgtccaaccgattccgccccgcctggctgctggtcctcgccgccctctctacctccgcgctggccaaagcgccggaaaccgtcaacatcggctatcaaaaggcgaatatcttcgcgctgctgaagtaccgcggcacgctggatgagagcctgaaaaaacagggcattgccgtacgctgggtcgaattccccgccgggccgcaaatgctggaggggctgaacgtcggtagtatcgatctggccgcgaccggcgatgcgcctccggcctttgcccaggcggcgcaagccgatctggtctaccttgcccactcccccgctaacccgaaaacggaagcgattgtggtgcctgaacagtcggcaatccacagcgtggccgacctgaagggcaagcgcgtggggttgaacaaggggtctgacgtcaactacctgctggttgccgcactggaaaaagcgggcctcagctataaagacatcaccccggtctatctgccgccggcggacgcccgcgccgctttccagcgcggggcgattgatgcgtgggtgatctgggatccgttcctcgcagaagtggaaaccaacgcgaaagcccgacagatccgcaatgccgaggggctggtgccgcactacaccttctatctcgccagccgcaagtttgcagatacctacccggagacagcaaagcaggtggtggatgagctgggtaaactcagcgcgtgggcgaacagccatcaggacgaggccgccgggctgctgtcgacctcaaccggactggataaagccatctggctgaagaccctggcccgcctgccctacggtgccgaacgcatgaccccggcggtgtataacgaacagcaggcgctggcggatacctttacgcgcatcggcctgctgccggtgaaagtcgacgtgcgcagcgccacctggtcgctggataaaccttgattttcctgacgacgggaagctctgcgcctcccgtcgccgacaggcttaccccgccgttttctcaccattgcctatctgccagataaaggtgggcgcttcaccgttcaccagccagttaccgatattacgtgccttataaatcaccggattatgcgaggcaaccgtccgcgcattgcgccagtggcgatccagcgcaaggcgagttcgcgtatccgacgccccgagggcattaaacagctccgtcgccgcccgcgggatccagtcgctggcgatcacctgcgcctgcgccgcttccacttccgccagctggttacgccgggcaatcaatgcttcgtcgtcgctgacgtgcgccacataggcctgctgcagcgattccgcggcctgcaggaccgcggcccgggtcgcccatgcccagctgctgatctgcccaacgacctgcagaacctgggcgtcatcgcgcggcacggcggcgttgccgtggctgtacatccgggaacgatgtttgacgccctgcgcggcatcccgctcaaccgccaggccaatgcccgcgagggtcgccagcagcacatgctggtagaaggcggtctgatagcgaaagcgctgggcaaaatcatagacatgttcggtttccacccgagcgccggtaaagcgggtggtcccgctgccggtcaaccgctggccaaagccatcccagtcatcttcccgcaccacgccggtctgctgggtgctgaccagggctatcacatcgctggcggtatcactgcgccgggcaaacacatcgatccagtcggcgtacagcgcgccggtgctgtaaaacttctcgccgtcgagtcgccagccgccctctgtcggcgtcactctggtgttcacctctcccagcttaaccgcgccgatctccgtccagccgctgcccaccagctcaccgtcgaggaagcgacgaaaccagcggtcgcgcccggcggaatccggctgattcagctgatcttccacaaaggcaaagtgcgcgcgcagggcctgcggcaggttagagtccgcttgcgccagctcgatcagcagcgcactgagctgcggcagcgaagcgccccagccgcccttctcgcgcgggatacgcagcgtgccgaagcccgcttctttcagccagcggatcggctcatcgggcagaatgcgctgctgttcgcgctccgcagcgccctgggcgatacgggtgaatatcgggcggaaggcggccgccagcgcgtcataatcggtgccagtagaaagcagggtcattgtcagttccttattcatgaagtgcgtcgatatcttctcgcgtcggttcatgacggaccgccagcaggaagaaaatgggaataatggcggcaagcgagaccacccagaacatctgcgtgccgagggaggcctgcagcagcggcagaataaacaacgccagcgcgctgccgatcccggagagtgcccggctgaaaccgaccccggtggcgcgaatggcagtaggataggagagcgccgggtagatcatcagctgcgcccccgggccaaacccttcggcgaacagccacagccccagcatcgcgatagccagcacgatacctgccgtcgcgtgcggttgccccaccagcgccagcacaatcagcgccacaaactgcagggcgaagccggctatcgccacatgacgcgaaggatatttccacgccagatgcataccgagcagcccaccggtaaaagcaaacagggcgttcagccccagcgatgccgaaatagtttcgaagacgccagccccgaggaactgggcaagaattgacggcaggaaaaaggcaatcgccgtgtactcgaaggagatacagatattcatcaccccggcgacgatagtccgctcgcggtagggtttttcgaacagcacgcggaagctcactttcggcgctggcgcgggcttcgccgccgggacctcatgggcatggatcccccaggagtcgcgtaaaatacgcactgcagaggtcagatcgccctggttcgccgcccacagcggggattcattcataaatcgactgcggacggcaataatcagcagtgccggcacggcgccgaacagcagggaggcgcgccacagccagtcaagatgctcctgcggcagcaggaaatagaggccgaagataatgagaaagcagacggttgaggcggcgtaccacatcgggcaccacgccgcgaggcgagccgctttgttgcctttgccggcaaagcgggaaaactcggccagataggacatcgctaccggcaggtcgatgccaacgccgatgcccatcaggaagcgggcgccaatcaacacccagacgttcggcgccagcccggcggcgatagccgaaatcacgaaaaagaacatatcggccataaaaaccgaatagcgaccatatttatcggtcagccagccgccgataatattgccgacgatagtcccgaccataatggacgaagtcaccaggccggtcagcagcggtgagagctgaaattcacgtacaacgtcatcaataccgtaggagagcgtggttaagtcatatgcgtcgagaaaaacgccccccagcgcgaggaagacaatcatccgcgcatatttcgcttgttccttgccggaattaattagccgcgccacatccccgacgctactgaccggtaccgaagcgataccgggattatccactggtaatgtactcattttttcaccttattattttgtgcaggtcatcagcggttatagaccgcgcgcgacgagaatcaaaacaacaaatcattctataataatcaatataatcaataagttaataaatatcaccagcacaaaaaggacgcgctttcacgcatcctcaagggaaataaataacaacgaaaatagacgtcgtgcaggacgcttattccgcggacactggaactaatacgtcttttaccagcgggtcatcggtggtttttaaccacgtctggatccgcggatcagaaaaagcctgttttaatttgacgatattttcctgcgataaatacggtgtaccaatcactaattgcgaagcaaaggtgcgcggcgccggcgggaataatatgcctttctcacgcggcactttcccggcgtcaaattgcgagacatagccgatggcggcatccaccgaatttaacgcccgcggcatggtcagcagatccagctctttaaagacaaactgatgcgggttaccgacaatatttttcagcttcgccgtgcgcggctccaccgccgggtcgagcgagatcaacccaatgcgctggagcagccacagggcctgcccctgattggcgccatcgtcaggcacgacaatggtcgcgccgttgggcaacgcctgtaccgacgagtagcggtcggaatagatgccaaacgcccactggaacaccggcaccgtggtcgacagcgcaaagccgttagcgtccaccacctgtttaagccaccactgatgctgatagatcgtcccggcatactgaccttccgctaccgcgcggtcagcctggaccggatcctgcacccccaccgcctccagtttcagaccgtaatcgggcgcaatatgctgattaatatactcaatgatccgctgctcgccggccatcgccggctcgtagtgaatttttaacgtgctgccgaagaccacctgctggctttgggtatgtccccgccaccaccagaaggcgatggcgagcaggataatcaccgccagcgccgccagccagggccagcgccgcgctttacgtaactcaaattgctctgttgtcatacaaggttcccctgcgtgtggcgtaaacggttgaccagacggtcacccaaaaattgaatcaactggatcgtggcgatcagggcaacgatcgtcgcgatcatgatgtggttgtcgaagcgctgatagccgtacaccacggccaggtagccgatgccgccggcgccgatggtcccggcgatagccgaatactcgatcatcgagaccaggtttagcgtcaccgccgccaccagcgcgggcatggcttcactgagctgcgcgctggcaatgatttgccagcgcgacccgccgcagacgacccccaccgcggtgacctccgccggcaactcgcgcagcgcgttctccaccagacggccaaagaacgggacgccggcggcgatcatcggcacgaccgcggcgggtatgccaatcgtggtgccggtcagccagtaagtgaacgggataatggcggccatcagcaccagaaacggcagcgaacgtcccatattgaccacccagttcagcagccggtacagcagtgcgtgcggaaataagccccgcggcgaggcgttaaacaacaccacccccaccagtcctcccagcgtgacgacaaacagcatcacaatggccaccatcagccaggtttcgccataggcggggagcagcagcgaagggatttcgccccagggggtatcctgactgatgactgtcggtttcataccgcctccctgagcaacggcgcgctgtcgaggatctccgccgttatgccgagctgcgccagcaggccctgcagtcgcgcgggcgacaggcgttcgccctgaaagcgcactccggcctgcaggcgaccggccagccgaccattaatcacctcgacgtgaccgccaaggagatcgatctgcagcgcccactgctggctcaggcggctgatccagtcggtggccaccggcacatcccagcggtagctcagacgcagcagcagatcgctgtgggtagctgccgccggcgtcagcggcaacagctgctggccgagcagagaatcgggacgcgccagcagatcttcgatccgcccgtactggacgatcgtcccgtcgcggatctccgccaccgcatccgccgccgtgcgcaccgcgtccatttcatgggtaatcaggacgatcgccagctggtactcatcacgcagccgcttgagcagagccagcaccgaggccgtggcctgaggatcgaggccggaggtggcttcatccgccagcagaacggacgggcgcagcgccagcgcgcgggcaatgccgatccgctggcgctggccgcctgagagctgggccggccaggcatccgctttgtggctcaggccgacgctctccagcagctcgccaacccgcgccttgatatcgcgctccaccacaccaagccacgccagcggcagggcgacattctcccaggcggtcctgcggctcaacagcgccgaagactggaaaacggtgccaatcgcccgccgttcccggcgcagcgcctcgccggacagcgccgacagatccttgccattgatacgaatgctgccgctgtccggttgctccagcaggctgatgcagcgcgccagggttgatttaccggcgccgctcggccccaccaccgcggtgatggagcgctcaggcacctgcagcgacagccctttcagcaccgcgctgagccggccatccgccgtgcggtaacttttatgcaggtcatcaatagcgatcatgtcaccttctcctctaccgatgccgccgtgcgcgcatcgcggcggtagctggcgcccgggtgaggcgcggccagacgcgggccgccgccgaacagtttttcgcgcagggtcccctcgcggtactcttgcttaaagacgccgcgcttttgcagctcaggcaccagcagctcgacgacatcgcggaaggtttcgtgagtgacggcataggcgaggttaaagccatcgacgtccgtctcttcgacccaggactgcagttcgtccgccacggtttgcgcgctgccaaccaccagcggaccgaagccgccgatccccgcccaatcggccagggcctgcaccgtccactggcggttcggatcagcggtcgaaaaggcctccaccgccgactgaatggcgttggtgtgcagatacttcagcacctgatccggctgatactggccgaaatcgatccccgtccagccggagagcagcgccagcgcgccttcatagctgacgtactgcttatattcctgccacttcgcctgtgcctcgcggtcggtgtcgccgacaatcaccgtctgcaggttgaagatcaggatgctgtgcggatcgcgccccgcctcagctgcccggcggcgaatatccgccaccgtcttcttcagcagcaccttcgacggcgctgcgacgaagacgcattcggcatggccggcggcgaactgtttgccgcggctggacgcccccgcctgatacagcaccggcgtgcgctgcggggatggctcgcagaggtggatccccggcacggaaaagaactgtccctgatggttaatgggatggattttccgcggatcgctgaagatcttccgctctctgtcgcgcagcactgccccgtcctcccagcttccctccagcagtttgtagatcacctgcaaatactcatcggcatagtcatagcgggtgtcatggtcggtctgggtctgctggccgatattgcgcgccccgctctccagataggaggtgacgatattccagcccacccgccctttggtcagatgatcgagcgtagacagacgacgagcgaaggggtaaggatgctcaaacgacagcgaggcggtcaggccgaagcccagatgctccgtcaccagcgccattggggtgatcagagccagcggatcgttgaccggaacctgcgtcgcctggcggatcgccgcatcgccgctgccgttcagcacgtcatagatccccagcacgtcggcgataaacagcccgtcgaacttgccgcgctccagcagccgcgccagatccacccagtactccagatctttatactgccaggagcgatcccggggatgcgcccacaggcccggcgactgatggccgacgcagttcatatcgaaagcgttaagacgaatttcacgttgtgatgacatagcaatctccatagcgcggcccgtcgccggggcgcacgcggcaaaatgaatcagggaaaagaaagagaggtattcagtacgcaggacatcgggagtcctgcgggatcccgagcgtgagtaacgcttgcgccgccacgtcagcggcatggtcggctacctgcggcaggcccatcagttcgccaaaacgcccgcgggcggccggaccggccaccagcaccggcagcgcctcaacgtgcggctcagccactgcccgggaacggctgtccacctccaggcccatgccgagggcatcggcgcgaatcaggccgcggcgggcgaggtcctgtaaaaatggctggctgtcggtcagggcgcggtgtgcgggtccggtggtcaggatcaggtgatcgacgctcagcgtctgcacgccgccgccgcgccgcgccagcgtcagacgcagcgtttcgccttcaccgcttatcgacagtagcctggccgcctgcacctgcagactgcccgtgcgctggcgcgcctccagcacctcggcgacctgcggcgccacgcggtagcggtggacatcccagtaatggcgcagatggcgcagaaaacgctggcgatcggcgacgctgagcgcctgccagatccgttgcccctgctgacgaaccgcatccagcaccacctgccagctcaggccctgctgcgccgcatacgcgacgtcgaggcggatctggcgcaggcgctggcgcaggctgccctgctgatagtcgccaggccaggttgcccctgcgccgctaaggttgccgcgcgacagcaggccatggcgcgaaaaggcgacgatactgccgcggtggcccagccggtccagcgtcgcgaccgtatcggccatggttaatccggtgcccatcaccgccacccgggcgtgcggggcgatggcatcgagcgcgccgggctgccacgggttggcaatcagcgccggatgatgacgccaggcttcggcctgcgtcggcagcgaaggcggtggatgactgatcgccagcaccagcagatcggccttaagctgcaggccgccgtcggtggtcaccatcccctgatgaaaagcgagcgcccgatcgcgcaggtggcgaagccgtccgccgctggacgccgcggcgtcggcaaaacgctgcgccacatagcgaccaaactggccgcgctgagggtagacggaaccgtccgggcgcagcgcctgcacatcgacggtaaaggcaggctgatggcggtaccaatgatcgaaggcgccctcttcgtcgccggccagctgcatgcgagcggccggaacgttaatccggtgcgtcggctccgcggtggagtaggccaccccggccccgggggactggcgcggctccagcagcgtcacgcgcaccccgttcggcgccaggcgcagcagctcaatcgccaccgccgcgccgctaaagccgccgccgataatcacgatatgcggttctgcactcatcgctgccctcctccggtatgctgtctcatggtcgcgctccgggccatcagctggcgctgacctggcgcaccgggcgcttatcgccgccgatggtttcgccaaacggaccggtgttcacgctacgcgccttcgacgaggccccgttttccagcggcaacagaggcatcaccagctcagcaaagcggtgcgcttcttccagatgtgggtagccggagaagataaagttgctgatgccgagcgcctgatattcgcggatgcgttccgctacctgctgcggattacctaccagcgcggtacccgcgccgccgcgcaccagtccgacgccggcccacagattgggcgcaatgcgcagattatcgcgcgatccctgatgcagggcgctcatccgcgcctggccggccgagtccatgcgggcgaagatcttttgcgcctgggcaatggtatcgtcgtcaagatgggcgatcagccggtcggcggcggcccatgcctcttcttccgtttcgcgcacaatgacgtgcagacgaatgccgtactgcagggtgcgtccgcgggccgcggcgcgctcgcgcaccaccgccagcttctccgccaccagttccgggggttcgccccacgtcagatagctgtcgatctgctcggccgccacatcaatggccgcatcagaagagccgccgaaatagagcggcgggccattctcctgcaccggcgggaacaacacctcagcgccttccacgtgaatatgctcgccgtgataatctactttttccccgcgcagcaggcgggtgtaaacatcaagaaattcgcgggtcacctgatagcgctcgctgtggctgaggaagataccgtcgcctttgttttccaccgggtcgccgccggtaacgacgttgatcagcagccgaccttccgataaacggtcgagggtggccgccatccgcgccgccagggttggcggctgcaggcccggcctgaccgccaccagatagcgcagacggcgggtcaacggcgccagcgccgaggccaccagccacgaatcttcacagcttttaccggtggggatcagcacgccgtagtagcccaggctgtcggctgccagcgccacctgctgcagataaggtaaatcgaccgggcgtccaccctcggtggtacccagataacggccatcgccgtgggtaggtaagaaccagaagacattgatcttgtcgggagcttgctgcgtcattatctatttcctatataaccatatccgatatttatcgaagagatgttttaatttggttatatgggtgttagcgataatcatgccaatggtgaataaaaaattaatcttttaaaatcaatgcactgaaaacggcttcgccgcgccgcgctgttgcaaatcgcgcagccaccgcgcatccgctggcgcatttgcaacagccgggggccttccccctctggtttctgcggccgccgcaggataagttcagagcgtcaacgatcggaggcccgctatgctgaacccagaatccccttccaccgctcccgcgctgatcgacccggcgtcgaaggccttccagagcctgctggacaaactcgcgccaacggaggcgaccgtgctgatcgtgggcgaaaccggcaccggcaaggaggtggtggcccgctatctccatcatcacagcgcccgtcgccagcagccgtttctggccgttaactgcggcgcgctgaccgagagcctcgccgaagctgaactgttcggccatgagaaaggcgccttcaccggcgcgcagcagggacagcccggctggtttgaagccgcggaaggggggacgctgctgctggacgagatcggcgaattaagcctgccgctgcaggtcaagctgctgcgagtgctgcaggagcgtgaaattacccgcgtcggctcacgcaaagcgattaaagtgaatgtccgggtgattgccgccacccacgttgacctggcccaggcgatccgcgagcgccgctttcgcgaggatctctactatcgactgaatatcgcggtggtgccgctgccgccgctgcgccagcgtcggcaggatatcccgctgctggcgcaccactttttatcactctacgcccggcgcctcgggcggccaaccctgcgtctggcgccggaatcactggcccggctgatggactattcgtggccgggcaatattcgcgagctggaaaacaccctgcacaacgcggtgctgctcagtaaagaagaggagatcagtcctgcccagctgcgcctggcgacgctcaacgacgccccggggccggcgagcgatcatgagctggacgactttattcgccaccagctggcgcttcccggcgagccgctgtggcagcgagtgaccagcgccctgattcgccacgccatggcacattgcgacgataaccagagccaggcggccgagctgttggggatcagccggcataccttgcgcacccagctcgctaacctcgggctgatcaaaagccgccgccgcccgcctgcgccgccgcgggcgttcgccaacgcagccggggccgatcgcgaactgcgcattggctaccagcgcttcggcagcctcgggatcctgaaagcccgtcagagcctggaaaccgccttcgccagcctcggcgtcaacgtgctgtggagtgagtttcctgccggaccgcagctcctccacgccctcgcctgcaacgagatcgacttcggcaccaccggagaagcgccgccggtgtttgcccaggccagcaatagcgaactgatgtacgtggcgtgggagccgccggcgccgcgcagcgtggcgatggtcgtcccgcaggagagcgacattcgccagctcagcgatctgcgcggtaaacgcatcgccctcaataaagggtcgaatgtccactggctgctgctgcagatcctcgaggacgccggcctgggtctgaacgatgtgcgggtggtctataccccgccgaaatatccgctgaccgccagcgactatctggcggttgacgcctggatgatgtgggatccgctgctcagcgacgccgaacacaccggcgagctgcgggtggtcgccagcggcgaaggccgggtcaacaaccatcagttttatctttcgcgacgggactacctcgctcagcatggcgatatcatgcgccgcctgctgacggagctgacccacaccgggcagtttatcgactcgcatcgcggcgaagcggcccgcttactctcggcagagctggggatcgacgcccggtcgctgagcatggccctcgcccgccgcagccatcgcccgcggccgatggatctgtcggtgatccgcgcccagcagaccatcgccgatcgcttttacgccctcgggcttatcgccaaaccggtcccggtgcgcgaagcggtgtggtacggcgaacccgcgccggacgtcatcagaccgctgatggcggtcagttagcgaaatttgcgcgttatcttcctgattgttcaggcgcagatagcctcgatctgatggcgatgttaccctaaagacgctgagaataagggggtatctgtggctgttcatctgttaatcgtcgacgcgttaaatctaatccgccgcatccacgcggtgcagggttcaccctgcgtcgatacctgcctgcatgccctggagcagctgattgtccacagtcagcccacccacgctgtggcggtgttcgatgatgaggatcgcgcccacggctggcgccaccagcgcctgccggagtacaaagccggccgcgcgccgatgccggagacgctggtcgccgagatgccggcgctgcgggccgccttcgaacagcgggggatccgctgctgggcctcgccgggcagcgaagcggacgatctcgccgccaccctagcggtaaaggtggcccaggcgggccatcaggccaccatcgtctccaccgacaaaggctactgccagctgctgtcgcccaccatccgcatccgcgactactttcagaagcgctggctggacgcccccttcatcgccagcgagttcggcgtcaccccggagcagctggcggattactgggggctggcggggatcagcagctcgaaggtgccgggcgtggcgggcattggacccaaaagcgccgcccagctgctgaacgagtttcaggacctggaggggctgtacgcccgtctggccgaggtcccggagaagtggcgcaaaaagctggccgcgcatcaggagatggccttcacctgccgggaggtggcccgcctgcagaccgacctccagctggacggcaatctgcagcagctgcggctgacgcgctgaccttcgttaagaggtgcgccggtgcagggtgactgcctccggcactgcctgctttacccgggccaggcaatcaccaggcagcctgatataacccgacgatatccgccaggctcgcctcgcgcgggttgccgccggtacacacatccgccagcgccgcctgggccagcgccggaatatcctctttcctgacgcccacctcgcgcagatggccgggaataccgacatcgcggttaagctggcagaccgcctctactgccgcctcgcgcgcggcggtcaggcttaacgcttccaccctgacgcccatcgcccgggcgatgtcgcgatatttttccccggtcgcctcagcattaaagcgcatcacgtgcggcagcaggatggcattcgccacgccgtgcggcgtgttgtaaaaagcgccgagcggatgcgccatgccgtgcaccagcccgagcccgacgttggaaaatcccatccccgccacatactggccgagcgccatagcttcccccgcgccggcgtcgccggcaaccgagccgcgcagcgcgccggcgatgatctcgatggccttgaggtgcagagcatcggtcaaagcccaggcgccgcgagtgaggtacccttcgatagcatgcgtcagggcgtccacgccggtagccgccttcagcgccggcggcatagcgtccatcatatcggcatcgataaaggccacctgcggaatatcgtgcgggtcgacacagacgaatttgcgccgctgttcttcatcagtgatgacatagttaatcgtcacctccgccgcggtacccgcggtggtcggcaccgcgaagatcggcacgctgggctgacgggtgggcgacagcccctcgaggctacggacatcggcgaattccgggttacgctgaataataccgatcgccttacaggtatcctgcggcgaaccgccgccgatggcgatcaggtaatccgccccgctgcgttgaaaggcctgccgcccctgctggaccacggcgatggtcgggttagggatcacgtcgctgaatatatcccatgccagcccggcggcatccagtttgtcggtgactttcgccgccacgccgcagcgggcgagagtgctgtcagtgacgatcaatgctttacgataaccgcgccgcaccgcttcatcggttaatgcgtttatcgccccccggccaaaccatgccgtttcattgaggatcattctgtttgccatcgtggctctcctgttagcgttgcggcatcactcttcaatgcgtaatccgtaggttttgaacttctccagcacgatggcgatcgcctcgtcatccagcaccgggaccgggtcggtaatcgccagcgtactgaggtagagctgggccaggacctccacttcatgcgccagccagagcgctttctccaggctggcctcgcaggcgatcaggccgtgatgctgcagcagcgtggctttgcggtgcttcagcgccaccgcgacatgctcagacagttcgcgggtgccgaaggtggcatagggcgcgcaggggatcgaattcccgccggccgcggcgatcatatagtgaatggccgggatgggccggttgaggatcgacaccgccgtacaatggacagcgtgattgtggaccaccgcctgggcatcgggtcgcgtctggtaggccgcctgatgaaaacgccattcgctggagggcagttttccctgctcatgctggccgtcggcatcaataaagacgatcttgtcttccgtcagcttttcatatgggataccggtaggggtgatcagcattcctccctgatagcgcacgctgacattgccggcggtcccctgatttaaccccaggcgggtcatttccaggcaggtatcgataatctgccgggccagtctgtttctttccattgcgttcctcttttggtgactcatcatccatcaacggcagggcaacagaaatatcgtcggctaccgtgggatagggtgaataatggtcttcatcatcaacctgaatattcaaaggggaattttcatgattattttttgtgagccgcgtcaattattccgccatgaataaagcaaccatacccattacgagagagattaaaatgcccgttcttaataatatttcatcaagcgggcattttatttctttgtaacaattgcccgttttccacaatatatattcattcggtcataagcgttgtggttttgtgaatttttttctcaaacggtcagcgtttttgaaaaattaaagtgacaacaatcacataaaatggcccacagtacgttaagtgtgaccatcatcatattaacaggcggtttttatttgaaaatgaagccatgagttccgccgtgactttcatttcactcaccggcgcgtcacctgagctcacttaattttgcggtctgctgcagcaccagactgcgccctgaatgctgttgtaaatgcttctgaactgatgaggacgctatgggaaacacaacgataccaacgcaaagttaccgcgccatggagagcgggcagagtaagagctacattattcctttcgctctgctgtgctccctcttttttctgtgggcggtggcaaataatctgaatgatattttattaccgcaatttcaacaggcctttaccctgactaacttccaggccggattaattcaatcggccttttactttggctattttattattcccatccccgccgggatgttgatgaaaaaattcagctacaaagccggcatccttacggggctgtttttatatgcctgcggcgccgcgctgttctggcctgccgccgaagtgatgaactacactttattcctgattggattatttattatcgctgccgggcttggctgtctggaaaccgcggccaacccgtttgtcaccgtcctcggtccggaaagcggcggtcacttccgccttaatctggcccagacctttaactcattcggcgccattattgccgtggtatttggccagagtcttattttgtctaacgtcccgcatcagccgcaggaggtgctggataaaatgacgccggaacagctcagcgcctggaagcacagtctggtcctgtcggtacaaaccccctatatgattatcgtggccattgtcctgctggtcgccctgctgatcgtctgcacccgcttcccctccctgcaaagcgatgaccacagcgacagcgcgcagagcacttttttcgcctcgctgacgcgcctgatgcgcatccgccactggcgctgggcggtactggcccagttctgctacgtcggcgcgcaaaccgcctgctggagctacctgattcgctacgctatcgaagagatcccgggcatgacggccggtttcgccgccaactacctgaccgccaccatggtctgcttctttatcggccgttttaccggcacctggcttatccgccgcttcgcgccgcacaacgtgctcgctatctatgcgtttatcgccatgctgctctgtttgctctccgccttcagcggcggccacgtcggtttgctggccctgaccctgtgcagcgcctttatgtccattcagtacccgaccatcttctcgctggggattaagcatctgggccaggacaccaaatatggctcgtcatttatcgtcatgaccattatcggcggcgggatcgttaccccggtgatgggctttgtcagcgacgccgccggcaatatcccgaccgccgaactggtcccggcgctgtgcttcgccatcatctttatttttgcccgtttccgttcacaagcggcgacgaactaaacctgttatccgcataacctgagggatctgtaatgaaaaaaatcagcttaccgaagatcggtattcgtccggtaatcgatggtcgtcgcatgggggtccgcgagtcactggaagcgcaaaccatgaacatggcgaaagccaccgccgcgcttatcagcgagaaactgcgccacgcctgcggcgcccgggtggagtgcgtgattgccgatacctgcatcgccggcatggccgagtcggccgcctgtgaagagaaattcagcagccagaacgtcggcgtcaccatcaccgtcaccccctgctggtgctacggcagcgaaaccatcgacatggatccgctgcgcccgaaggccatctggggctttaacggcaccgagcgtccgggggcggtctatctggccgcggcgctggcggcccatagccagaaagggatcccggcgttctccatctacggacatgacgtgcaggatgccgatgacacgtcgatcccagcggatgtcgaagaaaagctgttgcgcttcgctcgcgccggcctggctgtcgccagtatgaaagggaaaagctatctgtcgctgggcggcgtctcaatgggcatcgccggatctatcgtcgaccacaacttttttgagtcctggctcggcatgaaggtgcaggctgtcgacatgacggagctgcgccggcgaatcgatcaaaaaatctatgatgaaaccgagctggagatggcgctggcgtgggcggataaacacttccgctacggcgaagatcagaacgctgagcagtataagcgcaatgaaacgcagagccgcgcggtgctgaaagagagcctgctgatggcgatgtgcatccgcgacatgatgcagggcaacccgaagctcgcagaaaaagggctggtggaggagtcgctgggctacaacgccatcgccgccggtttccagggtcagcgccactggaccgatcaataccccaatggcgataccgccgaagcgctgctcaacagctcttttgactggaacggggtgcgcgaaccgtttgtcgtcgctaccgaaaacgacagcctcaacggcgtggccatgctgatgggccatcagctcaccggcaccgcccaggtgtttgccgacgtacgcacctactggtcgccggatgccgttgaacgggtcaccgggcagccgctcaccgggcgggcggagcacggcatcattcacctgattaactccggctctgcggcgctggacggctcctgccagcagcgcgacgcgcagggcaatccgacgatgaaaccccactgggagattgagcagagcgaggcggatgcctgcctcgcggcgaccgaatggtgcccggcgatccacgaatacttccgcggcggcggcttctcttcccgcttcctgaccgaaggcggcgtgccgttcaccatgacccgggtgaacatcatcaaaggtctggggccggtgctgcaaattgccgaaggctggagcgtagcgctgcccaaagcgatgcacgaccagctcgacgcccgcaccaactccacctggcccaccacctggtttgccccacgcctgaccggcaagggcccgttcagcgatgtgtactcggtgatggccaactggggcgccaaccacggcgtgctgaccatcggccacgttggcgcagatttcattaccctcgccgccatgctgcgcattccggtctgcatgcacaacgtggaagaggcgaaaatctatcgcccttccgcctgggccgcgcacggcatggatatcgagggccaggactaccgcgcctgccagaactacgggccgctgtataagcgttaacaggttggtttcgcccggaggcgcaggcttacctggcctaaagacgcgcgcggtctgtaggccggataagcgctgcgccatccggcaatgttgtttcgggagtcactatgaagcaagacgttatcctggtcctcgactgcggcgccacgaacgtgcgggcgatggccgtggatcgacaagggaacattatcgcccgcgccgcaacggcgaacgccagcgacatcgcggcggaaaaaagcgactggcaccagtggtcgctggaggccattatgcagcgctttgccgactgctgtcggcagatccatgaccagctggcctcctgcacggtgcgcggcatcaccgtcacgacctttggcgtcgatggcgcgttggtggatgagcagggcgccctgctgtatccgatcatcagctggaaatgcccgcgcaccgcggcggtgatggagaaaatcagccagtatatgcccgcgcgccagctgcagcggatagccggcgtcggcgcgtttgcgttcaacaccctgtataagctggtgtggctgaaagagaaccacccgcagctgctggcgcaggcccatgcctggctgtttatttcatcgctgatcaaccatcggctgaccggggagttcaccaccgacctcaccatggcgggcaccagccagatgctcgatctccggcagcgcgatttcagcgcgccgatcctgcaggcgaccggcctgccgcgccgcctgttcccgcggctggttgaagcaggccagccgatcggcgccctgctgccggaggccgctgcgctgctgggcctccccgtcgggatcccggttatctcggccgggcatgacacccagttcgctctgtttggcgccggcgccgggcaggatgagccggtgctctcctccgggacctgggagatcctgatggtgcgcagcgcgcaggtcgacacctcgctgctctgtgactacagcggctccacctgcgagctggacagccagccgggccgctataacccggggatgcagtggctggcctccggcgtgctcgagtgggtgcgcaaactgctgtggagcgctgacaccccatggcagacgctgattgacgaagcgcaggcgatcccgcccggcgcccagggcgtcaggatgcagtgcgacctgctcgccagccagcacgccggctggcagggcgtcacgctcaacaccacccgcggccatttttaccgcgccgcgctggaggggttaagcgatcagctggcgcagcatctgcaaaccctggaaaaaatcggcggcttcagggcgaaagagctgctgctggtgggcggcggcagccgcaacgcgctatggaaccagatcaaggccaaccgactcgggataccgatcaaagtcctcgacgatgccgaaaccaccgtggccggcgcggcgatgtttggctggtatggcgtgggcgagttctcttcgccagaacaggccagagcgcaggtcgcgtaccgctaccgctatttctggccgcaaactgaacctgaactgatagaggaagcctgagatgctcaaaaccatttccccgctgatatcgccggaactgctgaaagtgctggccgaaatgggccatggggatgaaatcattttttccgatgcccatttcccggcgcacagcatggggccgcaggtgatccgcgccgatggcctgcgagtcagcgatctgctgcaggcgattatcccgctgttcgaattagacagctatgcgccgccggtggtgatgatggccgccgtcgaaggcgatgcgctcgacccgacggtggaacagcgctatcggcaggcgctatcggcgcaggccccctgcccggatatcgtgcggattgaccgctttgccttctacgaccgggcgcaaaaagcctttgcgatcgttatcacaggagagtgcgctaagtacggaaatatccttttaaaaaaaggagtcacgccgtaatctcatgccggagcgtctgcctgatgcagacgctcaatcaatgatgggatgagaataaatgaaagcagcccgccagcaggcgatcgtcgatctcctgatcacccacagcatcctgaccaccgaaacgttgtcaaaacagctcaacgtcagcagggaaactattcgccgcgatctgagcgagctgcaggcgcagggcaaagtgctgcgtaaccacggccgggccaaagtgatccaccagcgcagccaggacagcggcgatcctttccacatgcgcctgaaaagccattacgcgcataaagccgacatcgcccgcgaagcgctggcctggattgacgaagggatggtgatcgccctcgatgccagctccacctgctggtatctcgcccgccagctgccggaccgcccgctgcacgtctttaccaacagccagcccatctgccaggagctggccaaacgcgaccagatcacgctcacctgctccggcggcactctgcagcggaaatatggctgctacgtgaacccggcgctgatttcccagctgaaatcgctggagatcgatctgtttattttttcctgcgaaggcatcgacccgcagggcgcgctgtgggactccaatgcgttcaatgccgacttcaaatcgatcctgcttaagcgggcggcgcagtcgctgctgctgatcgacaaaagcaagttcaaccgctccggcgaggcgaggattggtcatctggatgacgtgacgcatattgtgtcgaatgcgccgcagccttaaggggaaggccggaggacgcgcacgcgtctccggcctgagggggaaggattaacgctcgtcgcgacgtccgccgacggcggcccacaggcggcgcacgtgaacggtcacctcttcacgatcgtgatacagctgacgcgcctggatctgggcgttaacgccgtgctcgtccagctgggcctgaatataggccagattctgcgacacctcttcatagcgctttttcatcggcagcttgaggttgaagatggtctcccggcaccagccgttgaccagccactgcgccatcagcgccgccaccttcgccggtttctccaccatatcgcagaccatccacgagatgttgttgcggttcggacgatagcggaaaccgtcttcgcgcagccaggtcacctggccggtatccatcaggctctgggccatcgggccgttatcgaccgaagagacccacatgttgcgcttcaccagctgataggtccagccgcccgggcaggcgccgagatcgacggcatacatgccgttcgccagacgctcgtcccactcgtccgccggaataaagacgtggaacgcctcttccagcttgagggtggaacggctcggggcgtcggacggaaacttcagccgcggaatgcccatatagaacggtgagttgttgttgctgtatgagtagccggtatagcagcagccgggtgcgataaagaacacatgcaccaccggtcgctttggtgtttcatagttggtcagcacgcccgcctcgcgcagcgccgcgcgtaacggcaccgtaaacttgcggcagaacttcatcagctctttgctttcgttggtatccgccacttccacacgcagctcgccccccttctccaccacgccctgcagcatgccgacgatcggggttatgcgatcctccggcggcaggtcgcgcagcagttcgccgaccacaaacatctgtcgggcgaaaattagcgagctgaacggcagatcgcgcaccagcttctcgccgtcgtcctgctgataaccttcaaaaattacatagccagagtcttctttgacccgggcaaaaccaaacacctcaaggcgggctgccttatcggtaatttctgctgcgcactctttctcaaacccagggcgacaatagaggacaaccttattcatgaacaacgcccttacgtttcagacgaattgcaccaattaacattaaaacccaaccggcgaggaagcttacgccgcccaccggggtcacgaacgcccacagacgtaaatgagagagcgccagacaatagaggctgccgctgaacagcacggtccctaacgccagaaatacgctgctccagtagaaccagatactgatccgacgctgcatcgccaccgccagaccaaaaatcgccagggtatggaaggcctgatactccaggccggtatggatccaggccatctccgccgcgccgagcgattgacttaagacatgcgcgccaaaggcgcccagagccacaaagataaagccgctaatcgcggcgaatatcagcataaaacggctggtcatgttgttaccctacaagtaattattgttcataacgaaagcggaatttttcttgttcacttgccgctttcgccaggatccactgccggaaagcggctattttacccagttctgcctgactgtcatggcaaacaaggtaaaacgcattcttactgaccagaacatcattaaacggacacaccagacgaccggcttcaatttcggactgcgccatgacgttgttggccagcgccacgccctgcccgtgaatggccgcctgcagcaccatcgcgctatggctgaaaatcggcccctgctgcacattaatatggcttagaccaagctgacgggtataagtttgccagtcgcggcgggacgcatcgtgaagcagggtatgttgcgccagatcggcaggcgttttcaatgctttgtcgccggtgagcaagagcggggaacagaccggcagcagatactcggcgtacaatttttccacacgcaggcccggccagttgccgcggccgtaaaaaatcgccacatcgacatcgtccgccagcttatcctcctgacggtccaccgcctggatcctgacgtcgattcccggataagctgagttaaagcttgtgagtcttggcaccagccactgaatggcgaaacttggcaataaactgaccgttaatgcccctttggcgctgcgcgcctgcagtttacgcgtcgcttccgtcagttgcgaaaaaatctctttaatatcctgaaaatagctctgcccttcttccgttaacagcagcgaacgattgcgccgacggaacagcttaaggcccagaaaatcctcgagagacttgatttgatggctgactgcggcctgcgtcacaaaaagctcatcggctgcccgagtgaagctgagatgacgtgcggctgcatcaaaaacacgtaatgcattcagaggtggtaatcgcttcgacatggttattctggcttagatgttaactcaatttaacaaataggaaacaatgattaacctattagttttttttatctgagccattataaattgtccgttgaggttctaccagcaaatacctatagtggcggcacttcctgagccggaacgagaagctttttttggaatgcgtgttccatcaagcttttggcttacggttgtgatgttgtgttgttgtgtttgcaattggtctgtttttgcagaccctggtagcaaagctaccccttttcacttcctgtacatttaccctgtctgtccatagtgatttaatgtagcaccgcaacgcgcggtgcttttttttgcctttttactgccttactcgtccagttcacccagttgtttcacgtcagagcgattgatctgctgtttgttgccccacgcgtctttatacgagatcatgccagtgtcattatcggtttgcggtttcccgtcggtaacgatggtccgcccatcgttggtatgcatcacatagttagaggaacaggcgctcaggcctaaagtcagcatacaggcagagataatcgcagcggccttagtcattttcattcttctctccttacggctatttatactattcgtaactcgttaagtaataggttaaaacacaaacccaacacttttcagcataaccctctttgaccgacgtggagtcacattcggacaattccacaggacgcagagaccttgtcacgcccggcaaattgcgcgacgatcgcggtattgatacgaggaattccatgaacgcattcaacccggcgcactttcgcgcgcagtttccggctctggccgatgccggcgtctatctcgacagcgccgcgacagcgctcaaaccgctggcggtgatcgacgccagcgaccagttttatcgcctgagcgccggcaatgtccatcgcagccagttcgccgccgcccagcggctgaccgagcgctacgaggcggcccgcgatcgcgtggcggcgtggcttaacgccccttccggcaaagatatcgtctggacgcgggggaccaccgaggccatcaatatggtggcgcaaagctacgtccggccgcgcctgcagcctggcgatgaaattatcgttagcgaagccgagcatcatgccaacctcgtgccctggctgatggtggccgggcagaccggcgccagagtggtcaagctgccgcttggcgccgaccgcctgccggatatcgccagcctcagcgcgctgattaccccgcgcagccgggtgctggccatcggtcagatgtccaacgtcaccggcggctgcccggacctggcgcaggctatccgccttgctcacgccgccgggatggtggtgatggtcgatggcgcccagggagcggtgcatttccccgctgacgtgcaggcgctggatatcgatttttacgccttttccggccataagctgtatggcccgaccgggatcggcgccctgtacggcaaaagcgagctgctggcagcgatgtcgccctggctcggcggcgggaaaatgatcgccgaggtcagctttgacggctttacgccgcagccggccccctatggcctcgaggccggtacgccgaatgtcgccggggttatcggcctcagcgccgcgctggagtggctggcgcagagcgatatcggccaggcggaaaactggagccgcagtctggcgagcctggcggaagaggaactggcgaaacggccgggcttccgctctttccgctgccagcagtcaagcctgctggcctttgaatttgaggatattcatcacagcgatctggtgacgctgctggcggagtccggcattgccctgcgcgccgggcaacactgcgcccagccgctgctggcggccttaggggtcagcggcaccctgcgggcctctttcgccccctacaatacccaagacgatgttgcggcgctggtccacgcggtggatcgcgccctggaaattctggtggattaatgacaactctgcaccccttcggcacaaccattaccgacgctacgctgcgccagatcttcgccccgctgaaccagtgggaggataaataccgtcagctgattttattgggcaaaaagctgccgacgctgaccgacgagcgcaaagcgcaggcccatgagattgccggctgtgagaaccgcgtctggctgggctatgaggaggacgccgagggcaggctgcacttctttggcgacagcgaaggaaggattgtgcgcggtctgctggcggtacttttaaccgccgtggaaggaaaaacccgcgccgggatcctggcgcaggatccgctggcgctgttcgacgagctggggctgcgcggccagctcagcgcctcgcgcagccagggcctcagcgccctgagcgaggcggtgctcgccgccgcccgcgaaagttaatctcccgatttcgctttcccgccgccgcgcccggtggggaaactattttccggaagccgcagcgtcacgctgcgctttcgccagcatcttcttcagggcatgcgacaccgcgacgaagccgaaggtcgcggtcaccatcgtcgccgcgccaaagccggaagcgcagtccatccgcttcggcccttccgccgtgctcttcattgcgcagacgctgccgtccgcctgcgggtagaccagcgcttccgtagagaagacgcagtctacaccgagcttacctttgctgtttttcaccaccccaaactggcttttcagccgctctcgcagtttggccgccagcggatcctggatggtcttcgccaggtccgcgacctggatctgcgttgggtcaatctgaccacccgccccgccggtagtaaccagcggcaccttgtagcggcgacaccaggcgataagcgccgctttcggccggacgctatcgatggcgtcgataacatagctaaagccgacgccaagatattccgccacgttttccggggtcacgaaatcatccaccaccgtcacccgacactccgggttgatcaggcgaatacgctccgccatcacctccgctttcgccagcccgacgttgccgctgagggcgtggatctgacgattggtgttggtgacgcagacatcgtccatatcgataagggtgatcgccccgatgccggtccgcgccagcgcttccgccgcccaggagccgaccccgccgatcccgaccacgcagacgtgggcgtcggcaaaacattgcagcgctttttcaccatataaacgtgccgtaccgccaaaacgctggcgccaggcatcgctgattacaacagacatagaacctcagaacaaaatgacagcgcccggaggccgccgcaagcggcgtcatccgggcgccctggtcaacaggcacggccggggggggttagccgctaaaaacattccccgcgcccggggcgtttttcagcacccatacgcggccgtagtggttataccagccggcacggtggcccgcgtcaggcccaatgccctgatagatgtcgaaatgctgacctttgatggccccgccgacgtcgagggcgaccatcaggcgcagttcgtactggccgttaaacttgccgttattatccagcagaggcacctcggccagcaaggtggttcctggcggaataatcgaccggtcggaggccaccgaggcgcggccgatcagcggcacagcgctggcccctttcaccggcgcgaaagactgcggtttaaagaacacgaacgacgggttctgctccagcagctcacgcacttccgcttcgctgtgcttctcaccccactcgcggatcgcctgcatcgacatatcttctttcttcacttccccgcggtcgattagcactttgccgatgctgcgatagggccagccgtttttcccggcatagctaaagaagttgagcggcgaaccatcgccaaagtcgatatagccgctgccctgcacgtccatgatgaagttatccatcaacgagttgctatacgccagcacatagttatcgctcagcgcgccggcatagatgctggcgcgggacggcagcttaccgcgctttggcggcatacggtaaatggggtactggaattcgccctgacgggtgtggcgcgcctgcaccaccggcgtgtagtagccggtaaactggacgttgccatagttgtcgacgccctgcatctgccaggcgtcgatgccaaactggcgcagcgtacgggtgtcgccgccggcgcgcagccactcctgcagcgcgttatagacgttgctctggctattatagaggcgtggcgaggcgttacgaatttgattaacctgctcggagaagtcgccggcgttgatcggcgccccgacggcatccggctggtttaccagtgaaaacggctgggtgaacttgccatcgctatattgctgaccgcggtcggtcggttttgaggaacaggcggcgagcatggccagcattgcccccgtcgctacatattttgcccaacgtcctttcatggtgtctcatcttttgctgcgaagccttagtgcgtgttgaagataacaaagcgccggagctattgaaatgcgcgatctcatcgatggcacagatttgtgtaaaaaaacaccacaacatggcgttttataagccaattcttacaaaaatgtcgatttggtcgaaaaaaggttgcatcatctcgctagcggagtatagtgcgcttccacggacgcggggtggagcagcctggtagctcgtcgggctcataacccgaaggtcgtcggttcaaatccggcccccgcaaccaattaaaatttgatgaagtaaagcagtacggtgacgcggggtggagcagcctggtagctcgtcgggctcataacccgaaggtcgtcggttcaaatccggcccccgcaaccaatcaaatttgacaaagtgaagcagtacggtgacgcggggtggagcagcctggtagctcgtcgggctcataacccgaaggtcgtcggttcaaatccggcccccgcaaccaacattacaaacaccctcaagggtgtttttttgtttctgccgccggcaaaacctctgccgaaaacgggaacggccattgccgcccccatctcctgcttaccccttcggtaacacaatattgcttgccgccagcatgcccatgcgatggtacatcgcgcaggccgcctcgacgatcggcatcgccagcgccgcgccgctgccttctcccagacgcatgcccatattgagatacggttcgaggcccaggtgcgccaacgcgatacgcgcccccttctccgccgaatagtgggacgggatcagatacggtttcacctccggcgctatctgacacgccgccagcgccgccgcgtaggagagaaagccatccagcaccaccggcagcccacaggacgccgcccccagcatgacaccggtcatccccagcagatcgaaaccaccgactttgctcagtacgtcgaggccatcattcgggtcgggctgattgacggcgatagcccgccgcaccacctccatcttgttgccaaccttcgccagcggcagattggcgccaatcccgaccacctcctgcgcatcgctgccggtcaggacgctgacgatcgctgccgccggcgtggtattggccatccccagttcgccgacgccaaacagggtaacgccctcctgggccagcgcgcgggtgtagcgcatcacctccagcaacagctcctgcccctgctcacggctcatcgccggaccgcgggcaatattgccgcagccccgcgccacccgcatattcaccacgccgggcagcggttcgctatcgataccgacatcaattacatgcactttcgccccggcctgggcggcgagcacgcagacgccggtggtgccgcgggtcatatttgccgcctggatggcggtgaccgccttcggcgaaatcgccaccccttcgtcccacactccatggtcggcgcacatcaccagcaaggcctttttcgccacctgcggctggccgcccaggccgggcattcccgccagctgcaccgccagcgcctccagacgcccgaggctgccggggggcttgagtaagccgtcgatgtgttgctgtgcccgcgccatggcgtcggcgtccggcgcggggatcgcccgcagaaccgtgtttaaattttgcatacagaatccctgccagggctggcccggtcagccagcgattgagttatttgattttgacgccgatgccggagaccaccagccagaccgcatccgccgcggccgccaggcgctgattaacccgcccggcaatatcgcgaaaatgccgcgccaggcggttctccggcacaatgcccatccccacctcgttggtcaccagcacgacgtgcgccggacagcgctgacaggcggcaatcagcacgccaatttcgtcatcaatagcccgttccatggcggcgtaatcccagccgtcggggtcgctgtcgccgccgagcgcgaacagcaggttggtgaccatggtggtgatgcattccagcaaaatcgcctccgctggggcgatagccggggtgatcagttcatcaagctgctgccagcgctcggcggtgcgccagtgggcgggcctgccgtcgcgatgatgctggatccttgcggccatctcgtcgtcaaagatttgcgaggtggcgatatataacacctgcggcgcatcggcaatcagcgcctcggcatggcgacttttgccgctgcgcgcgccgccggtaaccagagtcagcataggggctcctgatgttggcgcatgatggcgtaaattttatcgatggcgatatgttcgcgcatggccttggccagccgatcaaactgccgggttttatagcgggcatactccagggcgctgtccagcggcgccagccctttgctctggcgcaggccgttgagcagcgcccgggtaaaggcatcgctgtcgaacaggccatggagataggtgccgaacgccaggccgtcgtcgcttatcgccccgtcgtccactgcctgccccgctttatgcaactgcagcagcggcgggcagcctgcctcgcggcgcgtctcgcccatatgaatttcatagccactgacgcgcagccccgccgcgtcggctaaccaatccgggagcgcagaccccagggtcgcctgcacctgggtggtggttttgtgctgggcgaagtgggtcacggtcttcagcacccccagcccgggctgggcgccaaggccagactccacctcatcgataatggtttcgcccagcatctgatagccgccgcagatccccagcagcggcaccttgcgctgccgggcctgctcgaccgcgtgcgccatgccgctctcgcgcagccagcacagatcgccgagggtatttttactgcccggaagaatgaccaggtcggcgtcggccagcgcctgcggatcgcggacatagcgcacccggacgtctggctgtgccgccagggcgttaaagtcggtaaaattggcgatatgcggcaggtgaaccacggcgatgtcgatatcgcgccggtcggtgcgatggtatttcccggcctgcagcgcgacgccgtcctcatcctcgagatccacgtcaagccatggcataacgcccagcaccggcaccccggtcaacgcctcgatctgctctatcccggagcgcaggagcgccacatcgccgcggaatttattgatgatcacccctttcacccgcgcccgctcctgaggctgcagcagcgccagcgtgccgtaaatcgcggcaaacaccccgccgcggtcgatatcggccaccaggatcaccgggcattgcgccatctcggccatgcccatattgacgatatcgcggtcgcgcaggttaatctccgccggactgccggcgccttccagcaccagcgcctcatactctccggccaggctctggtagaccgcgaggatctgctcgcgcaggcgcggcttgtactggtgatagctcaccgcatccatgctggtcgccacctgccccatcagcaccacctgcgcctgacggtcgctggtgggcttgagcaaaatcggattcatgcggacatccggcgcaatcccggccgcttcggcctggaaaatctgcgcccggcccatctctttgccatccggcgtaatgccggagttcagcgccatattctgtgatttaaacggcgcggtacgcagcccatcctgatgaaaaatgcggcacagtcccgccaccagcacgcttttccccacgtcggaagccgtgccctgcaacatcactgccagcgtcatgacgcctcctttatcgcgcctatcgcgttgttgtgcatccgctgaaaaaactccgcctcggttttacacagcggcagccccagttcgctatgaagtttcaccagccacggctgcgtcaatcccgccctgtccatcgtctccgcgcaggcaaatacctcgccgggatcccccgcggccagcacttcgccgtgacgcagcacgtaaacggcgtcgctcacctcatagatcagatcgatatcgtggctggagatcaccacgcgccgcccctgcccgacaatgcggcggatgatggcgatcatctgcgcccgcccgcgtggatcgaggcccgcggtgggctcgtcaagcagcaggtagcgcgcctgcagcaccagcgccccggcgattgccacccgttttttctgcccatggctgaggcactggatcggctgctggcgaaacccctgggcatcgacgagggtcaacgcctcatccacccggcgggcgatctcctcttccgccaccccgaggttacgcagactaaaagcgatatcgctgtcgatatcggtatagaagatttgctgatccggatcctgaaacaccgtcgccacctgctggcgcagcgccagcagaccgcgcttgctgtaattcagcgcctctccctgccacagcaccgccccctgctgcgggcgcagcaggccgctcaggttcataaacagcgtcgactttccgcagccgttggcccccaccaggccggtcaccgcatggcgggaaaaatccagcgtcagccctttaagtaccggctcatcctgatagcgaaaccagagatcggttgtggcaagcatacttatccttagaggtgaaaatcaccctggtacaatttgatatccagcgccgtgctcatctgctgatagcgcaggaggacgcgggtgaacagcagtcccaccagcatcgccagcgagcgatagccctgcggcacgctaccatagccaaaacgcagggtttgcgcgcggtgaatcgccatcgcctcgtccaacagaataaaaatgaagcgccaggtcagcaggatctgctccgtcaacagccgcggtacgcgaccgcgcttgagcaagataatcagctgggggaaaggcagattaagcaccagccagagcgtggccgccatcgctgccaggctgcgccagaaggtctccccggccacggccagccccggagcggaaatccctatcgagaaagcgcccagccgcaagctcgctaacagcatctgcgggtcgcggctaacgctgaacagaatggtcagcacgccgaccagcaaaaagccaaagggtagcgccatccagcggcaccagcgccagaatgagacccgcagcagccagcaggtcagcgcggcggtcagcgccagcgtcagcgcctggccccacgccggcagcgtaaaggccagcgccatcagcagcagccagagcagaaacttacgctctggcgccacctgcaaccagcggctctggtagctgagtcggtcaaacccggtcatcacggcgctgtctgcccctcgcatatccgagaatgtaaaaaatcaccgccgcgcccagcgagccctgcagggtaaacagcagactctcaatctcgccgctcgccggttcatatagcggctggaaccagggttgataatccggcgccaccacctggatctggctctccgcttcgccgtccgagccgccaaactcgccgccgtggttaataaaaaatggcaggatcatcagggcggccaccatcgccaacaggatcagggtctttttcatattaatgtgcctccgcggcgatcagtcgccgtttggttagctgatcgtagatcatcacggtgagcaagccttccgcgatggcgatcgggatctgcgtcaggcagaagatgcccataaacttggcgatcgatccgcctgccccggttgccggatcgggaaaagccaccccgagctggacggaggtgacaaagtaggtcatcagatccgccagcatggcgcagagaaagaccccgacatcgcgacggatccccgcccgacaggccagcttccacaccagatagccgaccatcgggccgatcaccgccatcgacatcccgttggcgccaagggtggtcaggccgccatgcgccagcagcagcgcctggaacagcagaacgatcgcccccagcaccgccaccacgcccggcccgaagaggatcaccgccagaccgacgccggtcgggtgcgagcagctaccggtcaccgacgggatcttcagcgccgaaagaacaaaaataaacgccccgcagagggccagcagcaccttctgattgctctcttcctgaacgatacgccgcaggcgcaccaggccgtaccacaggcagggtaaaaacagcagccaccacgccagcgcccacatcggcggcaaaaagccctccatgatatgcatggcgaacgcctcctgcgggacgatgatcagcagaacagcggccgccagccccccatacgaaagctgcttcagcgatttcacctgattcattacgcctcctcccactgtttgttaaccagaatggtcgagaaatagggcagcggctggtcatcgctgacctcgcgcagacggcgccagcactgctcgcccggcagggtggcctctgacatcatcagcgccgcatccagcagccccgcctgcgccagcagcgccttaatgcgggcgaagcggccgtagactttcatcagcaccagactgtcatgctggcgcagcgccgcggcaatgtccgcttccggcgcggtgcaggagatcaccgccagcgactgctgctccatggccagcggggttttcgcccgcgcggcaatggcggcgaaggaggtaacgccagggacaatctccagccactccgggcagccaatccgctgcagcagaaagacccaggtgctgaacaacatggcgtcgccgagggtgataaacccgacctgcctgcccgccgccacctcctgggccagcgccgcggcaacgtcgttccacaccgcctctttttccgcgctgtcggcgctcatcggaaaatggcagcagcggacctccgtgtgtgcgcccaggtactcgcgtacgatggagagcgccaggctgtcgccgcctttgcggccggctggcgcatacagcacatccagctggccgaggatccgcgccgcacgcacggtgatcagatcggccgcccccggcccgctgctcagggcgtatagtttgccgctcatgctgctttctccatcgtgtcgttcagcgccagctgcagatgggcgacaaacatcgcccgcaccgccggattctcccctaacccgttaagccatggcgtggcggggataccggcggcattgaagcgggttttccacgaatcgtcttcgtcggaggccatatcattaatggcatgatcgccggccaccagcatcagcggcatcagatgcacgccggtcacgccctggcgggagagttcgttaatgacgatgtccacttcgggatagctttccaccgcccccacccgcgccggaaaaccctgcaccgccatcatatgatccagacaggcgtaggccgcgaaggcgtggtggctggcgccgtgccccataaacaccactcgctccgtcgccgccagcggcggcatctgctggcgcagggcctgcatcagctgcacgtaatcgccatgaccgctcaacagcggcgcgcccagcgtcagacgctgaaagcgcgggcgcatgctctgcacttcgcgaacgatcttctcgtactcgtcgccgttgataatgtgcagggactggatagccacatcctggtatccctgctcggccagcttttgcagagcctgcagcggagtatcgatatgaataccatcgcgctgctgcagtttgcgaataatcatccccgaggtgaaggcgcggaacagcgtgcggtccgggcagctggcggccagatcgcgctcgcaggcggcgatgttcttctcgcgggtgtcgtgatagctggtgccaaagctcaccaccagaagtgcttttttcatatcctcttcctcaagtcgccgacagccagcgcgtcagccgcgcagtgaaatcggcctggctttgcagtagttcatcgcccgtcaccagcggcgccggacgggtaatgacgatgcaggggatccccgcatcaagacagggttgtactttttcctgatagcctccttcagcccccgaggctttcgtcaccacaacatcggcccggcactggcgataaaaggcggcgttaaattcggcgctgaacggcccgcagagggcgaagatctccccgacgccaaaccccagatcgctacagtgctgaaccacctccggcaccggcagcacccgggcgagcagcgttttctccgccagtcccgcccgccaggccgccagatctttgctgccggtggtcagcaggatccgctcgccgaggcgacgagccaccgcgcaggcctcgttcagatcgccgaccacgtgaagtagcggatggcgcagatcgctcagctgctccggcctttgatagcggctgagcagaaccccgacgctggcgcaggcgcgcacaatattctggctgaccacctcggcgtaggggtgagaggcatcgatcacccagcgggtgcgctgcgctctgagccactccgccatctgctgccactccatacgcccgcagcgtatctgcccgcggatatcgccggccagccgctcgccggtaggggtcgccaccgacagggtgtagcgtacgtcggcggcgtccagctgctggcagatcgcccgcgcatcgctggtgcccccgataaccagcacgtcgccgtgattcacagcgcgtagcctcgcggggtgatcatcaggccgttgtcgatgtaagtcgctttgttgccaacgatcaccagactggtcatatccactggggcaaaatccatctccccgagggtggtcagccatttctcctgctttttgcgtccggcggatttgactacgccgaccggcgtatctgcgcttttactggccgccagcagcgtaaaggcgcgcgccagatgtccttcgcggccgcggctgcgggggttgtagaaacagataacgaagtccgcttccccggcggcgactatgcgtttttcaatcaccggccagggcgtcagcagatcgctaaggctgatatggcagaaatcatgcatcagcggcgcgccgagcagcgaggcggcggcgatactggccgtcatccctgggatcagacggacctcaatgtccagctgctgcttattaaccagctccagcaccagccccgccatgccgtagatgccggcgtcgccgctgctgatcagcgcaacgttgtgcccggcctgcgccagctcgatggccgcctggcagcgctcaatctctttgcacatgccggttttgatcacctgcttgtcgccggtaaaggcttttaccaggtgggtgtaggtcttgtagcccaccacgatctctgccgcctgcagggcctccacggcttccatggtcatcatcgcctgcgagccagggccaattccgattacgtttaacatcagtgtgttactcccaaagtaatggtcacgccctgctcacgcagggtttcgccggacaggtttccctgactcagcagccaggccaccgggccggagacgctgccgacgccgaccgtctcccggacaaaagacgaggccggaaagcggtgctcgtgctcgcgcagcgcctcggcgctgaaggtttcgaacggcacccggcagcggtgagccagctggcgcaaccccggctcgtttgccttcaggctcacgctgccgatcgctttcagcgccagcgggtcaagacgctgagcggcaagctggcgatccagcaacgtacagagcagcgcgcagggggtgtcgcgccgacagccgatccccgccaccacccgctggggcaccagcttccagtgaggcaccggcagcggcggcagcgaccggcgcagggtgacgcagatcagggcgtcgagcgccggcaagctcgccaggtcgcttaccgggataaacccgcgccggtcgcagcggcttagcgccccgatgaattcgccgtcgcaccacagccccacccgcttaccgctcaccagcatctggttaacggttttcaccgccgcgcgaaaatcggtcatccgggcgttcagctggaaggccagcgtgtcgagggcggccagctcgttgacgtcggtggcggtggtgatcaccgggtcggcgtcgagcatcccggcgagatagcgggttagcgcattggcccccccggcatggccggagagcaagctgatgacgtgccgggcgcgctcatcaatcaccaccaccgccgggtcgctgagcttgtcattcaccagtggggccagcacccgcacggcaatcccggtggcgccgataaaaatcaacgccgagaagctgctgaacgcctcgcgggcagcgctggcaaagccgccgttgaaggggataaacccctcttcctgcagcgcttcgctggtgtaacaggtaagcggcagcatggccgccagccgttttgccagccgcacgccgccgggcgtcaggcaaaacagggcaatggattcaggctttacggtattcatggctaaaatccgctgcgtacagttttgagtagtgatactcatcgccgaggaaggggccgaccaggatcagcgccgttttgcggatcccggcgtcgcgtactttgtcgccgatgtccgcgagggtaccgcggacggtctggctttccggccaggtggccttgtagatcaccgcgaccggggtggtcgcggggtagccgccctccaccagccgctccgccacccggtgaatacgttgcaccgacaggtaaatcgccatcgaggtttgatggctggcaaaggcttccagctgttcgcgcgcgggaaccggcgtgcgcccttccagacgggtaataatcagactctgcgagacttcgggtaccgtgtactccacccccagctccgccgccgcgccgaggaaagcgctgacgcccggcaccacctgccagcggatcccgcggcgggtcagctcttcgccctgctcgcgcaccgagccatatagcgagacgtcgcccgtctgcagacgcaccaccgtttttcccgccttcacccccgcctccatcaggtcgaggatctgctccagatgcagcgcggcgctgtcgtggcactccgcctgtggcggacagtaggccagtagctcggtgttgatcagcgacccggcgtagatcactacctgcgcctgctgtagcagacggtagcctttgagagtaatcagttcgcgatcgcccggaccggcgccgacgaaccacacgcaatggggatcaaaagtctcagccatggttttcttccttctgacaggcgatgacaaaaacgggattatggggtttgaagtagtggccgctgcccagggtagccagggtggagaccgccagctgctggcagtccacctcgtggatgccgctctgccgcaggtgcgccagggcgctatgaaggttttcctgcaaaataaaagtcatcaccagccggccgccaggatgcagctgcgccagcgaccagtcgatcagcgccgtcaggtggccgccgctgccccccataaagatcgcgtcggctttgtcggcgaccgccagcggcgcaacgcccgccacgatagcgatgttgtcgcagccaaagcgctgccggttctccgccagcaggcgcagcgcgtcggcctgacgctcaatcgccgtcacccgcagcgccgggttctgtagagcagcctcaatgctgacgctgccggtgcccgcgccgatatcaatcagatggcgcgcccggtgcagctccagcttcgccagcgccagcgcgcgcacggcctctttggtcatcggcacctgggcgccgcgcaaaaacagctcatctttcatcgaggatcaccaccgcattcatctcatattcgtcctccacggcgctgaccggcagccagtggatccgctcgttttccatcgccagattctcgcctatcaccatccagcgatggcctttgccgcgggccatcagctgggcggctatctcccgcggtccgcagcggccgtcggtcaccatggcgactttccggtgggcggccagagcatcgaagctcaccgcccggccatggctgctggtcagccacatatcgttcatgtcgatgcccgcccgggcgcagaggtactgcaccgcgctgatgccggggatcacctgcactcgttcccggccaaaatgggcaatcagccgggtgccaatgccatagaacagcgggtcgccagaggccagcaccacgacgcggcgcccggtatgggcctcaatccacgccagcagcgccggcatatcggcccccagcgcgaagcgctcgccggcgaagtcgggaaactgctggagatggcggctgccgcccaccagcgcctcagcggcggcgattgcctcgcgcgcggccgggatcagccactgcagccccgccgggcccattcccacgaccgtcaacatgtcagctcccgggcaatcgcctccagcggacggctgctgcccagtacctggttatcaaaagaaaacagaaccgcgtcgcaggtgggcggttgctgagtgaagcgcagcatctcaagaacacgctggcagattcgctcagccagatggttatagaggcgctggtatccccaggcgtcgatatgctccattgccgcttcggtagtgtcgcactcgctgaccagcgtcagcagcggcagcggcgcgccaagcagcgccagatgagcgacgagagtttccatccgcgcatcggcgatatggctgtgggtatgaaagatcccggcggcgattttgatcagtttgccgggatggccaatgagcacaatctggcggaaaccgagccgaaccgcctcttcaatcatgtagccgacgaagttgctcatggtgaccaccatctgcgggtcgatgcccatctgctcgcggacaaagcgctcaccgtggttgcccggcaccagcaccacgcgctccagcccggcggcgcgttttatctccagctcgagggagagcgagcgcttccagctctcttccgacatcggggtaacgatccccgtggtgccgataatcgagatcccgccgaggatccccagccgggcgttataggttttttgcgcgcgaagtacgccttccggagcaaaaatctccacctgcgcgccgcgggtaggacctatcgcttcgcgcacggcggtctcgatggtgtgccgcggagtgcggtttatcgccgggctgcctgtcggcaggccgatccctttgcgggtcaccgtgccgataccctccccgccctgcaggctaatctctccgctgtcattgagggtgacccgggcaaaaatcagcatgccgtgggtggcgtcgacatcatcgccgccgtctttacggatcgcggcgaccgcctgctgcccttcgacgtgcggggactcaacgttcaggcacagggtgacgccggagggggtgacgatcgagacctgatgaatcagatgctggcgcatcaccatcagcgccgccacttttgccgccgctgtggcgcaggagccggtggtgtagcccttgcgcagcgctttgccgtgatgccacaccggggcgtcaaaggtctgatcgctcattgcgcctcccgcaggtggtaaagcagagcgttcacaatcgctgccgccacgttgcttccccctttgcggccgagcgcggcgatggccggcaggccgctctcgctgagcgccgctttcgactccgccgcgccgacgaacccgaccggcacccccaccacgccgccgatggcggtctcgcgatgttccagcaggcgaaacagcgcggttggcgcattgccgaagacgaacactttctccccgggctcctgcaccgcaatatccaccgccgccatcgagcgggtcatcccccggctttgcgcctcgcgcaccacccgcgggtcgctgatatagcagcggcattcgccgccaaagcgggccagcagggttttgttgatcccggacagcgccatggtggtatcggtatacagcgtgcagggccggctcaaggcctcactcagcgcgatcagggcatccggagaaaaccacagaatatccagccagtcgaagtcagcggtggtgtggatcacccgcttgataatcgcctcgtgcagcgggctggcgaaacggtagtccggtcgcgtttcggcgatgatctcgctgatgatgtcgaagcttttcgcctcgatcgcctgcggttgttggatgtactgcatcaggttctcctcaggccgcgccgaccagccagtagcgcacgccgataaacagcgccagcgccaggcttgacgccacccacattaatcgaatggttcgggaaatatcgtccaccgcgatgtcgcggacggcgtcgcctatccagggcttttcaacgcgctggccgaagtaatcgttcgggccgccaaggcggatccccagcgcgccggcgacggtcgcttccggccaggcgcagttaggactgctgtgctgatagcgatcgcgccagcccgtacgcagcgcccgggcgccatcttcccggcatagcaccgcggcaaggctgagcagcagccagctcagccgggcgggaaggaagttggctacatcatcaagacgagcgctgaccatgccgatcgcccggtatttttcgtgtttatagccgaccatggaatcgagggtgttgaccgctttataggccatggccagcggcgcgccgccgaggagcaggaaaaagagcggcgcgataataccatccaccgtgttctccgccacggtctccaccaccgcacggttgatctgcgctggctggagctgagaggtatcgcgcccgacaatccaggagagcttatgccggctttcggcgagatctccggcctgcagcggccgggccaccgccatcgccgactgtgccagacagcgtcccgccagcgcggtgaagatcatccacacttccaccagccatccaagccaggggtggatcccgtgcgccagcgccagtacgccccaggcaacgccccatgtcaggccgatcaccaccagccacatcaccccgccgccgatgcgcagcgcccggtcgctatggcagacgcgtcgcactacacgctggctgacggcgatcaggcgacctatccagcgcaccggatgcggccagtgcggcggatcgccaatgacgacatcaagtatccaggctacacaccaggcgagaagggtcatagcgccctccttgctgcctgcagccagtggttgagcatggtcgggcgctgggcaaaatggacatggagatagctggcaaaggcgctgccggactgccatcctccctgccactgctggagcgtcttaccgtctcgctgtttacggcaggccagtacggcgggagtggcgggagaaaaatcggagtaatgaaattcatggccgcgcagccactcgccaggggctgccagcagcgtctgctgctgcgcctgcgcttcgcagtagccgaaccgggtcagacgcgtccccattcggctgtgtccgggaataatatccgccatcgtgtagcgctcgccgctggtgacttccagggtcgtgcccaggtacatcaggccgccgcactcggcgtagatcgccaccccgcgccggtgcgccgcgcgaagctgtgtcagcatctcgtggttagcggatagcccggccgcatgcagctccggatagccgccgccgagccagatcatctggcaggccggcagctggcgatcgcgcagcgggctaaagcgcaccatcttcacgccgcagcgcgccagcagcgccaggttatcgaggtaataaaaattgaaggcctcatcgtcggcgagggccagcgtcagtccttcgccggcatcggcggcaagctgttctccccactcgccgatcggcatggcggccagttcgctgagggccagcagccggtctatgtcgagggtgcgccccagcaggctggcaaaatcccgccatgcctgctgattgaccaccgactcgcgggcggtcaccaatcccagatgtcgttcgggcagcgccacgccttccacgcgcggcacatagccgagcactggcacccgacagtagcgctcaatggcgcttttcagcagctggaagtgcgcgtcgctgttgacccgattgacgataacgccagcgatgtcgagagccggatcaaaatgttgaaaacccatcaccgtggcggcgatggaggtcgacaccgctttgccatcgaccagcaaaatcaccgggcagccaagctgcttagccattgccgcgctgctgcagtagttagggtcggtgccgtagccgtcatacaggcccatcaccccttcgataaccgcgatatcggcctgctgtagctgttcggtaaacagcgcgttgagtatcggggcgggaagcataaagctgtcgagattgcgggaagcgatgccgctgatggcggtgtgccaggcggtatccaggtagtcaggcccgactttacagggttgcacccgcataccgcgctgttggagcaagctgagcaggccgagcgtaacggtggttttgccacaaccgctgccggtacccgcaagaatgaacgcacgcctggttgccataccctgtcctgttctggcggtcagggtatagctacgcgcatgcctggtcctgcgaccacgcaccgctaagccacccacttcccaccgaagttgttggtcagttaccggcaggcaggtcttctggcttagcctcgttctcgcccgcccttcccaatctttcgatcagtggtttttgcggggtcgtcagcatcacagcagcgggggctgcgggggatttacacccccttccctgacaccaaactggtgtcgaacctgtcggtttgtttcgccgatgcgccctgcatcgacgggtattactttatgttttcttttaccgtttcatcactcgtcacaatgacgtcagtgaaggaaagcggtgttgtgataatcagctgtctcgtattaacggacactctatctcatcacaaaaataaaaactggtgtagtttatccctcgaatatcactattttgttgcgctatgacaatttattgctctactgtcgtttttttcattttatattgatgaagatactcggggatatcaaaaatcggcaatagcaaaatattgtcatttaaaaagactcagtttgtgatccagcattaatttgctgacgaaatgcctgcggcgttacctgataggtctggcgaaacactttgcaaaaatagctggtttgcgaaaaacctaaattccgcgcgatgctggcgatgctccagtcgctgtggcatagcagctcttttgcgctcgccatccgctgctgattgacccaggcgttaaaaccgatcccctgatactttttaaacagtttgctgaagtagtacgggctgagatagacatgcgccgccacatcctccagacgcagctcatcggagagatgcgcgtcgatatagcgcagcgccttcttcattttgccatcgtgcggcgagggcgcccggctggcctgcgccggatcgttctgcgacgggttatctttgataaccacaaagttgagctgttttttcaggcaattctcgacgatcagcttcagcagatccgccgaagcgataacccgcgaatagtccatctccggcacatcgcgaaacgcctggaccagcgccggatcgtcctgccagcggtcatcgacgttcaagatatcaaccagttcaacatcattgctcagacgcacctgcccgcacagcacgaaaccgaccaggtggccggcgatcaccagcgggatggaaaaatcggttaaccccgcatgacagcggtagatacacagctggtctttttttgaggcttccagcccgccgcagcggtcgctcatgcgacagcgtccgctgtgctccgggtgctgacgcatcagctggcaaaacggcgtgaaattaaacaattcagaaatctcatcaccgtgaatattgacgaccacaaccgccagactggtggcttgcgcaaaatcctgtgcgattttattgatgagttctgagttcaaggtactcgcagaaatcatgataaaacccctcagttaattttttgttataaataaaacatatttttcatatttaccttttttagcatcagatcccatcgacgataaaaaagtgcattgacaataacaaaagtctcccaacccggggagactttttgagcggttcgtgatatcggttcatgaaattagcctggctatttcacagatacattccccttatgacgctaacgcgtattttcttcctccacgcaggtatgacagggcagattattggcgataagaaaacgataaattgcggcgccgaggcaggcccctaacaacggtgcgataatgggcacgataaaatagggaatatctcttcccccggtcatggcgatattgccccacccggcgaaccaggtgaacaatttcgggccaaaatcgcgtgccggattcatcgcgaagccggtaagcggcccggtcgaggcgccgatcaccgccaccagaatgccaatcaacagcggcgccagtgggcccttgggtacgccgttgccatcatcggtgagcgccatgatcatccccatcagcatcgaggtgatcaccacctccaccagcgccgcatgccagatgctgagctcaggcgccgggtaagtgctgaatatactggccagctgcaggctttccaggctgccgcgcaccatatgatgcaccgtttcaaattgcgtaaacagggtgctgtaaagtatccaggccagcacggcgccgccaaacgcgccggcgacctgagccacgatatagggcaccacttttctgcccgggaagcaggcaaacagccacagggcgacggtgaccgcagggttcagatgtccccccgaaatgccggccgtcaggtacaccgccagagaaatacccagtccccagataatacagatctcccacagccccaggctggcgccggtcagtttcagggcgctcaggcagcagataccaaaaaacagaaacagcccggtgcctaaaaactcggcgatacattgcgcgcgtaaagaaccattcattgtgacacctcgtgacgaagttcgtgtccaggccagccaaccatccgctggctcgttgggtacggcgaggcccactatagaaaccggcagcggcaaagtgttggcatcctgcggaaatcgggcggcgtaaagtcgccgaagaagaataatttattgctatttgttcgcgaatccatgcagcaatggcgggcgttcagggggtattttaatttccaactaaatgataaaaaattgcgaaagcgcagtgcttattttccaacaaatatcacatcacgcaaaatatcgcatagcaaaaacaatttaaaaaatcacctcttaaaatgtaaatacggagcgtgaattgcaatataatcacatttatataaacaataaaatcaaataaaaacaacgatataaaataaaataaatccattttatattatataaaaaccactatttttcgctctccaccatcaactcagccattctttttcgccgctccgccatatagttccctcactggcacatatcctgcgaggtctttatgcaacaagaagcattaggaatggtagaaaccaaaggcttaaccgcagccatagaggccgctgacgcaatggttaagtcggccaacgttttattagttggctatgaaaggatcggttcaggcctggtgaccgtcatcgtgcgtggcgacgtgggggcagttaaagccgccaccgacgccggtgccgccgcagcccgccacgtgggcgaagtgaaagccgtacacgtcattccccgcccccataccgatgttgaaaaaatcttaccgaaggggaatagccaatgagcagcaatgagctggttgaacagatcatggcgcaagtcatagcccgtgtagcgacgccagagcagcaggcgcttcccgataccccccatcccacaggagagacggctatggcagagaaaagctgcagcttaacggaatttgtcgggaccgccattggcgacaccctcgggctggtcatcgccaacgtggatgccgcgttgctggaggcgatgaagctcgaaaaacgctatcgctctatcggcatcctcggcgcccgcaccggcgccgggccgcacatcatggccgccgatgaagcggtcaaagccaccaacaccgaagtggtcagcattgagcttcctcgcgacaccaaaggcggcgccggccatggctcgctgattgtgctgggcgggaatgatgtttccgacgtcaaacgcgggattgaggtcgcgctgaaagagctggaccgtaccttcggcgatgtctacggcaacgaagcgggtcatattgagctgcagtataccgcgcgcgccagttatgccctggaaaaagcgttcggcgccccactgggccgcgcctgcggcattatcgtcggcgccccggcgtccgttggcgtgctgatggccgataccgcgctgaaatcagccaacgtcgaggtggtggcttacagctcaccggcccacggcaccagtttcagcaacgaagccattctggtgatttccggcgactctggcgcggtgcgccaggcggtgatctccgcccgggaaatcggcaaaaccgtactggcgacgctgggcgccgaaccgaaaaacgatcgcccctcctacatttaatacccgcgaggctgattcatgagatcgaaaagatttgaagcactggcgaaacgccctgtgaatcaggatggtttcgttaaggagtggattgaagagggctttatcgcgatggaaagccctaacgatcccaaaccttctatccgcatcgtcaacggcgcggtgaccgaactcgacggtaaaccggttgagcagttcgacctgattgaccactttatcgcgcgctacggcattaatctcgcccgggccgaagaagtgatggccatggattcggttaagctcgccaacatgctctgcgacccgaacgttaaacgcagcgacatcgtgccgctcactaccgcgatgaccccggcgaaaatcgtggaagtggtgtcgcatatgaacgtggtcgagatgatgatggcgatgcaaaaaatgcgcgcccgccgcacgccgtcccagcaggcgcatgtcactaatatcaaagataatccggtacagattgccgccgacgccgctgaaggcgcatggcgcggctttgacgaacaggagaccaccgtcgccgtggcgcgctacgcgccgttcaacgccatcgccctgctggtgggttcacaggttggccgccccggcgtcctcacccagtgttcgctggaagaagccaccgagctgaaactgggcatgctgggccacacctgctatgccgaaaccatttcggtatacggtacggaaccggtgtttaccgatggcgatgacactccatggtcgaaaggcttcctcgcctcctcctacgcctcgcgcggcctgaaaatgcgctttacctccggttccggttctgaagtacagatgggctatgccgaaggcaaatcgatgctttatctcgaagcgcgctgcatctacatcaccaaagccgccggggtgcaaggcctgcagaatggctccgtcagctgtatcggcgtaccgtccgccgtgccgtccgggatccgcgccgtactggcggaaaacctgatctgctcagcgctggatctggagtgcgcctccagcaacgatcaaacctttacccactcggatatgcggcgtaccgcgcgtctgctgatgcagttcctgccaggcaccgacttcatctcctccggttactcggcggtgccgaactacgacaacatgttcgccggttccaacgaagatgccgaagacttcgatgactacaacgtgatccagcgcgacctgaaggtcgatggcggcctgcggccggtgcgtgaagaggacgtgatcgccattcgcaacaaagccgcccgcgcgctgcaggcggtatttgccggcatgggtttgccgcctattacggatgaagaagtagaagccgccacctacgcccacggttcaaaagatatgcctgagcgcaatatcgtcgaggacatcaagtttgctcaggagatcatcaacaagaaccgcaacggcctggaggtggtgaaagccctggcgaaaggcggcttccccgatgtcgcccaggacatgctcaatattcagaaagccaagctcaccggcgactacctgcatacctccgccatcattgttggcgagggccaggtgctctcggccgtgaacgacgtgaacgattatgccggtccggcaacaggctaccgcctgcaaggcgagcgctgggaagagattaaaaatatcccgggcgcgctcgatcccaatgaacttggctaaggggtgaaaaatggaaattaacgaaacgctgctgcgccagattatcgaagaggtgctggtggagatgaaatcaggcgcagataagccggtctcctttagcgcgcctgcggcttctgtcgcctctgccgcgccggtcgccgttgcgcctgtgtccggcgacagcttcctgacggaaatcggcgaagccaaacccggcacgcagcaggatgaagtcattattgccgtcgggccagcgtttggtctggcgcaaaccgccaatatcgtcggcattccgcataaaaatattctgcgcgaagtgatcgccggcattgaggaagaaggcatcaaagcccgggtgatccgctgctttaagtcttctgacgtcgccttcgtggcagtggaaggcaaccgcctgagcggttccggcatctcgatcggtattcagtcgaaaggcaccaccgtcatccaccagcgcggcctgccgccgctttccaacctggaactcttcccgcaggcgccgctgctgacgctggaaacctaccgtcagattggcaaaaacgccgcgcgctacgccaaacgcgagtcgccgcagccggtgccgacgcttaacgatcagatggctcgtcccaaataccaggcgaagtcggccattttgcacattaaagagaccaaatacgtggtgacgggcaaaaacccgcaggaactgcgcgtggcgctttaacaaaggatatcccgatgaataccgacgcaattgaatccatggtacgcgacgtgctgagccggatgaacagcctacaggacgggataacgcccgcgccagccgcgccaacaaacgacaccgttcgccagccaaaagttagcgactacccgttagcgacccgccatccggagtgggtcaaaaccgctaccaataaaacgctcgatgacctgacgctggagaacgtattaagcgatcgcgttacggcgcaggacatgcgcatcactccggaaacgctgcgtatgcaggcggcgatcgcccaggatgccggacgcgatcggctggcgatgaactttgagcgggccgcagagctcaccgcggttcccgacgaccgaatccttgagatctacaacgccctgcgcccataccgttccacccaggcggagctactggcgatcgctgatgatctcgagcatcgctaccaggcacgactctgtgccgcctttgttcgggaagcggccgggctgtacatcgagcgtaagaaactcaaaggcgacgattaacagggggtaagcatgcgctatatcgctggcattgatattggcaactcctcgacagaagtcgccctggcgacggtcgatgacgcaggtgtgctgaacattcgccacagcgcgttggctgaaaccacgggtataaaaggcacattacgaaatgtgttcggtatccaggaggcgctaacgcaggcggcaaaagcggccggcattcagctcagcgatatttcgcttattcgcattaacgaagccacgccggtcattggcgatgtggcgatggaaaccatcacggaaaccatcatcaccgagtccaccatgatcggccataacccgaagacacccggcggcgtcggactgggggtcggcatcaccatcacaccagaggcgctgctgtcctgctccgcggacactccctatattctggtggtctcctcggcctttgactttgccgatgtcgccgcgatggtcaatgcggcaacggcagcgggctatcagataaccggcattattttgcagcaggatgacggcgtgctggtcaataaccggctacagcaaccgctaccggtgatcgacgaagttcagcatatcgaccggattccacttggcatgctggcggccgtcgaggtcgctttacccggtaagatcatcgaaacgctctccaacccctacggtattgcgaccgttttcgatctcaacgccgaggagacccaaaatatcgtgccaatggcgcgggcgctgattggcaaccgctcggccgtggtggtgaaaaccccctccggcgacgtcaaggcccgcgctattccggcaggtaatctgctgctcatcgctcaggggcgcagcgtacaggttgatgtggccgccggggcggaagccatcatgaaagcggttgacggctgcggcaaactggacaacgtcgcgggagaagcgggcaccaatatcggcggcatgcttgagcacgtgcgccagaccatggcggagcttaccaataagccagctcaggagatccgcattcaggatctgctggccgttgatacggcggtgccagtcagcgtgaccggcggtcttgcgggagagttctcgctggagcaggcggtgggtatcgcctcgatggtcaagtcggatcgcctgcagatggccctcatcgcccgtgaaattgagcacaaactgcagattgcggttcaggtgggcggcgccgaagcggaggcggccattcttggggcgctcaccactcccggcaccacgcgcccgctggcgatcctcgatctgggcgccgggtcgaccgacgcctccattatcaatgcgcagggagagatcagcgccactcacctggccggcgccggcgatatggtcacgatgatcatcgcccgcgagctggggcttgaggaccgctacctggcggaagagatcaaaaaatatccgctggctaaagtcgaaagcctgtttcatctgcgtcatgaagacggcagcgtccagttttttccgtcggccttaccaccgacggtatttgcccgcgtctgcgtggtgaaaccggatgaactggttcccctgcccggcgatctgccgctggagaaagtgcgcgccattcgccgtagcgccaaatcacgcgtctttatcaccaacgccctgcgagcgttacgccaggtgagccctaccggcaacattcgcgacatcccgttcgtggtgctggtgggcggctcgtccctcgatttcgagatcccccagctggtcaccgacgcgctggcgcactaccggctggttgccgggcgcggcaacatccgcggctgtgaaggcccacgcaatgcggtcgccagcggattactcctttcctggcaaaaaggaggcacacatggagagtagcgtagtcgcccccgccatcgtcattgccgtcactgacgaatgcagcgaacagtggcgcgatgtcctgctgggcattgaagaggaaggcattccttttgttctgcagccgcagaccggcggcgatcttatccatcacgcctggcaggcggcgcagcgttcgccgctgcaggtaggcatcgcctgcgaccgggaacggctcatcgtgcactacaaaaatttacccgcatcaactccgttgttttcgctgatgtatcaccagaacaggctggcccggcgaaacactggcaacaatgcggctcgtctcgtcaaagggatcccatttcgggatcgccatgcttaatccacaggagaacgcagtatgaataacgcactaggactggttgaaacgaaaggcctggttggcgccattgaagccgctgatgcaatggtgaaatccgccaacgtgcagttgattggttacgaaaaaattggctccgggctgattaccgtgatggtccgcggagacgtcggcgcggtcaaagccgccgttgacgccggcagcgcggcggccagcgtggtcggcgaggtcaagtccagccatgtgatcccgcgcccgcatagcgatgttgaggccattctgccgaaatccgtctgaccctcaaaaaaggagcaccgcgtgaagcaatcactgggattacttgaggtcagcggtctggccctggccatcacctgcgccgacgctatggcgaaagcggccgccatcacgctgctcgccctggaaaagaccaacggttccggctggatggtggtgaagatcgccggtgatgtggcctctgtccaggcggcggtgatgaccggggccgaactcgccgaacggcagcaggggctggtagcgcagaaggttatcgccaggcccggggaaggcctgctgccggcccgcgtccaggcgccttcaccagcgcctgacgtcgccgtgacggaggagaacacggccctcacagacgccccctcccactctacggagcgggtgacctgcaacctgtgcctggacccacactgcccacgacaaaaaggcgatccccgctcgcagtgcctgcacgccggtaaacgaggtgacgcgtaatggataaacaacagctggcttcgacagtcaacaaagtgctggatgagatgcgccagcgtcccattccaatcggtatctccagtcgccatatccatttagcggcggctgactatgccaggctttttcccgcgcagcccatccagccgaaaaaagcgctgctgcagccgggacaatatgctgcagagcagacggtgaccctggttggccccaaagggcgattaaacaacgtgcgcctgctcggccctttgcgccagaccagccaggtggaaatctcacgcaccgacgcccggatcctcggtatcgccgcgccgctgcgcatgtccggcaatctgcagggcacgccggggatccgcctgataagcccctttgccgaactggagttgagcggcgggacgattgttgcccagcgacatattcatatgtcgccacttgatgcgttgatcctgcgcgtctcccatggcgatagcgtcgcggtggcgatcgaaggcagcgacaggcggcttatcttcgacaacgtggcggtccgcgttgccccggatatgcgtcttgagatgcacatcgatactgacgaggccaatgcggcaggcgctgacgctgcgcaagcctgggcaacgctggtgacgaagccatgaaccacgcgatgctgcagcgtatcgtcgaagaggtcgccgcccgtctgcgccatcgcgccctcagcacggccacgctcagcgtggcccagctcggcgaagcggatatccgcagcctgctgtgccagcacgcttcgctgcgcatcgtgcaggtggatttaccgctgctggagcagcttgccggccagcgtgcgctggcggcagccggttgcgcactgcatgaggcgatggcctggggcgttcgggtacagctaacgctgcttcccgcccagctccccgcgctggcggtaaaaaaactcgcccgcttgccgctgacgttcagcgacccgcttggccagcccgtcaggcttcacgccgcgtcggtgctcacctatgccgacgtagcccgtttcagtggcggctatctggtgctgcgccgccgccccattatcaccgccctcgcccgcgaagcggccgtcgcgcggcatgttcaattgattaagcaggagtgaactatgcatctggcacgcgtgaccggcgccgtcgtctcgacgcaaaaatcgccctctctgaacggcaaaaaactgctgctggtgcgccgggtaagcgcggacgacgatcgtccgattctccccacgagcggcgatgaagtggcggtagattcggttggcgctggcgtcggcgagctggtgctgctctgcagcggctcgagcgcacgccacgttttcagcggcccgaatgaggccatcgatcttgccgtcgtgggcattgttgactcactttcacgctaagggggcgcctgtggctatctatacccgaaccggcgatgccggcagtacatcactctttaccggccagcgggtcagcaagacgcatccgcgcgtcgaagcctacggcaccctggatgaactgaacgccatgctgagcctgtgcgtctgcgccgtcgctgaagaggaacagcgcaccctgctcgaagccctgcagcagcacattttttggttcagcgcggagctcgccagcgacagcgaacagccatcaccgggtaagcgctatatcagcagcgaagagattgccctgctggagcagaccatcgatcgcgagatggcccgcgtgccggcgctgcaccagtttgtattgcccggacgctgtgaagccgccagccgtctgcacctggcccgcaccgttgccagacgggcggagcgccggctggtcgagctgggggcagaggttactatccgtcagatgctgctgcgttatctgaaccgcttatctgactgcctgtatgccctggcgcgcagcgaggatcatgccgctcaccagcgccgccttgtgacggagatcgcggcccgctatctggccgccagcgggtcgcctgcgcccgacgcgcccaaagcccaggccgggtcgctctcctttcacgagctgcatcagctcatccgtcaggccattgaacacgcccgccagctgcaggtgccggtggtggtcagcatcgttgacgcacacggcaccgaaaccgtgacctggcgaatgcccgatgcgctgctggtcagcagcgagctggcgccgaaaaaagcctggaccgccgtcgccatgaaaaccgccacccacgagctcgcgacgaccgtacagccaggcgctgcgctgtacggtctggagagccatctgcagggcaaagtcgtcacctttggcggcggatatccgctgtggcgcgatggccagctaatagccggcctcggcattagcggcggcagcgtcgagcaggatatggctattgcacaggctgccatggcggccattaacgtgagaactcatcaatgaatacagcagaactggaaacccttatccgcaccatcctcagtgaaaagctcgcgccgacgccccctgcccctcagcaagagcagggcattttctgcgatgtcggcagcgccatcgacgccgctcatcaggcttttctccgctatcagcagtgtccgctaaaaacccgcagcgccattatcagcgccctgcgggagacgctggcccccgagctggcgacgctggcggaagagagcgccacggaaaccggcatgggcaacaaagaagataaatatctgaaaaataaagccgctcttgaaaacacgccgggcatagaggatctcactaccagcgccctcaccggcgatggcgggatggtgctgtttgagtactcgccgttcggggttattggcgccgtggcgcccagcaccaacccaacggaaaccattatcaacaacagtatcagcatgctggcggcgggtaacagcgtctatttcagcccccatcccggcgcgaaaaaggtctcgttgaagcttatcgccaggatcgaagagatcgcctaccgctgcagcgggatccgtaacctggtggtgaccgttgccgagccgacctttgaagccacccagcaaatgatgtcccacccgctgattgccgttctggctatcaccggcggccctggcattgtggcgatgggcatgaaaagcggtaaaaaagtgatcggcgctggcgccggcaatccgccgtgcatcgttgatgaaaccgccgatctcgtcaaagccgccgaagatattatcagcggcgccgccttcgattacaacctgccctgtatcgccgaaaaaagcctgatcgtcgtcgcctccgtcgctgaccgcctgatccagcagatgcaggattttgacgcgctgctgttgagccgacaggaggccgataccctgcgtaccgtctgcctgcccgacggcgcggcgaataaaaaactggtcggtaaaagcccggctgcgctgctggcggcggcgggtctcgccgttccgcctcgcccccctcgcctgctgatagccgaggtggaggcgaacgacccctgggtgacctgcgagcagctgatgccggtgctgccgatcgtcagggtcgccgactttgacagcgccctggcgctggccctgcgcgtagaggagggtctgcaccacaccgccattatgcactcgcagaatgtctcgcggctcaatctggcggcacgcaccctgcagacctccatttttgtcaaaaatggcccgtcttacgcgggaatcggcgtcggcggcgaagggtttaccaccttcaccatcgccacgccaaccggagaaggcaccacctccgcgcggacgttcgcccgcctgcggcgctgcgtgttgaccaacggtttttccattcgctaaccgggggcgccatgcataccttttctctgcaaacgcgcctctacagcggcccgggcagcctggccgcgctgcagcgctttagccatcagcacatctggatcgtctgcgacggcttcctggcgcgctcgccgctgcttgaccgactgcgcgccgcgctgcccgccagcaaccgcgtcagcgtgttcagcgatattacaccggatccgaccattcacaccgtggcgaaagggatagcgcagatgcaggccctgcgtccgcaggtggtgatcggcttcggcggcggctcggcgatggatgccgccaaggctatcgtctggttcagccagcagggcggtctgcctgtcgacacctgcgtggcgatccccaccaccagcggtaccggttcggaagtgaccagcgcctgcgtcatcagcgacccggaaaaagggatcaagtacccgctgttccatgaggcgctctgtcccgacatggcgatcatcgacccgacgctggtggttagcgtaccgcccaccatcacagcccataccgggctggacgcgctgacccacgccctggaggcatgggtctcgccgcaggccaccgattttaccgatgcgctggcggaaaaggccgtaaggctggtgtttcgcgccctgcccgttgcgattcgtcagggcgactgcattgcgacccgcagcaaaatgcacaatgcatcaaccctcgccggtatggcctttagccaggctggccttgggctcaatcatgcgatcgcccatcagcttggcggccagtttcacctcccccatggcctggccaatgcgctgctgctgaccgcggtgatccgcttcaatgccggcgagccacgagcggctaagcgctatgcacgcctggccagggcctgccgcttctgcccgcccgaagctggcgaacaggaggctttccaggcgctgcttaccgcggtggaaacgctgaaacagcagtgcgccattcccaccctcaagggcgcgctgcaggaaaagtatccccttttcttatcgcgaattcccgccatggtgccggccgcgctggccgacgccaccctgcgcaccaacccgcgtccggtcgatggcgcggccatcgcgcaactgctggagagcctgcaatgagtgaagcgatagtgccactatcaagcattgatgcagcggagatccgcgaacgcgttcgggccgctggcgtcgtaggagccggtggcgcaggctttccgacccacatcaaactgcaggcccgggtggacaccgtgctggtgaacgccgccgaatgcgaaccgatgctgaaggttgaccaacagctgatggctcagcaggctgaccgactgattcgcggcctgggttacgcgatgaccgccactggcgcccgggaagggatcattgccctgaaggcgaaatatgctccggcgattgcggcattaaccccacgactcccggaatgggcccggctgcatattctgcctgacgtctatccggccggggatgaggtgctcactatctggctggcgacgggacgccgcgtaccacctgccgcgctgccggtcagcgtcggcgtggtggtcaataacgtgcagacggtgctcaatatcgccagagccgtggaacagggctatccggtaactcgccggacgttgaccgtcaatggcgccgtcgcccgtccactgacgctggccgtaccactgggtatatcgctgcgcgaggtgctggatctggccggcggcgcgacggttgacgatccggggtttatcaacggcggtccgatgatgggctcgcttattacctccctcgagacaccggtcaccaaaaccaccggcggcctgctggtgctcccgggcaaccatcctttgatccagcgacggcggcaggatgaacgaacgctgctcgccatcgcccgcaccgtctgtgaacagtgccgtttatgcacagatttatgcccccggcacctgatcggccatgagctttcccctcatctgctggtgcgggcggtgaactatcgccaggcggccaccccgtcgctgctgctcagcgccctgacctgttcggagtgcaacgtttgcgagagcgtcgcctgcccggtgggtatttcccccatgcgcatcaaccgtctgctgaaacgtgagctgagggcgaaaaacctgcgctacgacggaccgctgcgtccggcggacgagatggcgaagcaccgcctggtgccggtcaagcggctcatcagcaaactgggacttgatccctggtatcaggaagcgccgctgacggcggtggaaccggaggtggcctgcgtcaccctgcccctgcgccagcatatcggcatcagcgccgtgccctgcgtcgcgccgggagagcgggtaacgcgcggccaggtgctggcggatatccccgccgacgccctcggcgcgccggtgcacgccagtattgacggcctggtctccaccatcacggagcaggccattacgcttgtaagaggttaatcatgacccaggctatcggaattttagaactgaccagcatcgccagggggatggagctgggcgacgtcatgctgaaaagcgcgaacgtacagctcctgctctgcagaaccctttgccccgggaaattcctgctgatgctcggcggcgacgtcggcgccgtgcagcaggcaatcgccgccggcaccgcgcgcgccggggagatgctggtggacagcctggtgctggccaacattcaccccagcgtactaccggcgatcagcggtctcaacgtggtcgggcagcggcaggcggcggggatcgtcgaaacctggagcgtggcggcgtgcatcagcgccgccgaccgcgcggtgaaagcggccaacgtcaccctggtgcgggtccatatggcgtttggtatcggcggcaaatgctacatggtggtggcgggtgatatcgccgatgtcgacaacgccgtcacggtggccagcgacagcgcaggcgagaaaggattactggttcaccgggcagtgatcccgcgaccgcacgatgcgctgtggcaacagctgatggagggataatggaaccgcaaacccctaccgaacgcatgatccaggagtatgtcccgggcaaacaggttactctggcgcatctcattgccaatcctggcaaagatctgttcaaaaagctgggtctgccggacgcggtctccgccatcggcattcttaccattacccccagtgaagcatcgattatcgcctgcgacatcgctaccaagtccggcgcggtggagatcggttttctcgatcgcttcaccggcgcggtggtgttgaccggcgatgtctccgccgtggagtacgcgctcaggcaggtcacccgcaccctcggtgagctgatgcgcttcaccgcttgcccaattacccggacctgagcccatgaaacgcctgatgctaatcggacccagccagtgcggcaaaacctcgctgacccaggtattgcgtggcgaaaccctgcgctatcagaaaacccaggccatcgtctggacgccggccgccatcgatacccccggggaatatctggaaaaccgctgcctgtacagtgcactgctcaccagcgcctgcgaggccgatgtcatcgcgctggtactaaatgccgatgcgccctggtcacctttttctccggggtttaccgccccgatgaaccgcccggtcatcggggtgatcactaaagccgatttggccgccccgccccgtctgcaacaggtccggacatggctcgagacggcgggcgccggacatatctttatcaccagcgcgttaaccggcgacgggcttgatgacctgttcgcctgcctgaatgcagaggaatatcaatgacctataaaatcatggcgattaacgccggcagctcctccctgaagtttcagctgcttaacatgccgcagggggcgttgctctgtcaggggttgatcgaacgtatcggcctgcccgaggcccgcttcacgctgaaaacgtcggcacagaaatggcaggagacgctgcccatcgccgatcaccatgaggcagtgaccctgctgctggaggcgctgaccggccgcgggatcctgagcagcctgcaggagatcgacggcgttggccaccgcgtcgcccacggcggcgaacgcttcaaagacgccgcgctggtctgcgacgataccctgcgggagatcgagcgcctggcggagctggcgccgttgcataacccggtcaatgcgctgggcatacgtctctttcgccagctgttacccgcggtaccggcggtggcggtttttgataccgcctttcaccagaccctggcgccggaggcctggctctatcccctcccctggcgctattacgccgagctgggcattcgccgctacggttttcacggtaccagccatcactatgtcagcagcgcgctggcggaaaagctgggcgtaccgctgagcgccctgcgggtagtaagctgccatctgggcaatggctgtagcgtctgcgccatcaaaggcgggcaatcggtgaatacctcaatgggctttactccccagtccggggtgatgatgggcacccgcagcggcgatatcgacccgtcgattcttccctggctggtggagaaagaagggaaatccgcccagcagctcagccagctgctgaataatgaatccgggctgctgggcgtctccggcgtgtcctctgattaccgcgacgtcgaacaggcagccgacgccggcaacgaacgggcggctctggcgctgtcgctgtttgccgaacgcattcgcgcgactatcggcagctatatcatgcagatgggaggtctggacgcgctgatctttaccggcggcataggcgagaattccgcccgggcgcgggcggcgatctgccgcaatttgcattttctcggcctcgcgctggacgacgagaaaaaccagcggagcgcgacctttattcaggcggataatgcgctggtcaaagtggcggtgatcaacaccaatgaagagcttatgattgcccgcgacgtcatgcgtcttgcattgccgcaggcgcgcgagctggcggtgtcggcataaacgacgcgcctcctcttgcggagaatcatggtaaccggcgggtcgccatgccactatgcgccctggcgaaggtaagcggaaaggtgaaaacgtggctgttgcacaatgtcccgcctcgtgcggagaacttatccagggctggatcctcggcagcgaaaagctggtctcctgtccggtggactggtacagcaccgtcgaggtcgagaccggagtaccgcgaaaagacgagcggccgctgtcgcgggcgatggtcgaccagctgctggcccactggggctaccccccagcgctgagccagcagatccgcatcaccctgcactcaacgatcccagtggccaaagggatggccagcagcaccgccgatatcgctgccaccgccgtcgccaccgcccatcatctgggccatctactggatgagccgacgctggcgcgcctgtgcgtcgcgctggagcctaccgacagcaccctgtttcgccagctgacgctgttcgaccataataccgccgccacgcaaatcgcctgtccccctccgccggcgctcgacctgttagtgctggagagcccgctgacactgcgcaccaccgactatcaccagctgccgcgcgagccgggcctgttggcaaacgcctcccggctgcagctggcgtgggagaaagttcaacaggcctgccactgcggcagcccgcagctgctgggcgaagcagcaaccatcagcgccattgccagccagcagctgttgcctaagccggggtttgacgcgctgctggacctggtggaaagcgcagggctctatggtctcaacgtggcgcacagcggcagcgtcgtcggcctgctgctggaccgccgtcggcatgacgtcgaatttctgcaatggcggctggcagacagcgacatcgccgcccactggccgcagcagcatctgttggcgatggtgcccgggggcgtcatcctgcagtaggcctcaggccagcacccggcgcaacgccaccagcagctggtcgttttcctcggcgctgcggatcgccacgcggaaatagcggctatccagccccgggtagttggcgcagctgcggatcagcacatgctggcgcagcagggcatattgcaggtcaaaatcgggtctgtcgcagcgcaagaacaggtagttagcacgcccgggccatacggtcagcccggccatctcctgcagctgcgcatagaaacgcgctccctcctcctgcagccactgccaggtggcccgctgatacgcccgatcctggagaataatttccccggccagggcggcataggcgttgatggaccacggcatttgtcgcgcgcgcagtcgggccaccgcctgggcatcagcgttcagcaggtagccgagacgcagccccggaatggcataaaatttggtcagcgatcgcaaaacccagacgtgcggatgctgcgccagcagaggaataaaccccggctggtcggggataaagtcgaggaaggcctcatcgaggatcaggctgatgttcagcgctcggcagcgctgcgcaatggcttccagcaggccccgctccggcagcaggccggtggggttgttcggggtgcagagaaacaggcagtccagcgccggagtcagggcatcgaggatcgcgtcggtcagctgccagccatcgcgctcccgcagggcatactccaccacctcgcagtccaccgtctgcagcgcccgccggtactccgcgaaaccgggaatgacgatcatcgcccgccgcggcttaaggccgtggacgagggtgaagatcgattcagtttcgccgttgccggcgaggatatgcgccgtcggcaactgatggtgggcagccagcgcctgatgcagctgttgatactcgacgtcagggtagcgttcggcgcagcccgggttgtcaacgatcgcctgcctgagcgaggcaggcatccccagcggattgatgttggcgctaaaatccagcagctcgccgggggctatgcccagcagggcggcggcctcgcggatattgccgccatgggcgcttttcagtaaggccatgtccctttcctgtgtggttatccgcggcgggccagcgtcgcgccgtcggcgaagtaggctttaatcccggctaggatcgactcggccacctcctgctggaatttggccgttttcagtttccgctcttcttccacgttactgataaacgccgtctccaccagaatggaggggatatcaggcgccttcagtaccgcaaagcccgcctgctctacccgattcttgtgcaaattattgatattgcccattttctccagcaccgcctttccgaatttgaggctgtcggcgatggtgagagactgcaccatatcgaacatggtgtggtcgacatagcggtcgccgctcttgctgaccccaccgatcagatccgaggcgttctgcgtctgggcgagatattttgccgcggtactggtggcccccttggtggagagggcaaacaccgaagagccgctgggctggcggctggtaaaggcgtcggcgtgaatcgacacgaacaggtcggcgcgctgcttctgcgccttggcgacacgcactttcaacgggataaacacgtcttcgttgcgggtcatataggccttcatattgccttctttgtcgatcagcgcccgcaggcgacgggcgatctgtagcaccacgtctttttcgcgggtgcgatacttccccacggcgccggagtcttcgccgccgtgcccgggatcgagcatgatgacaatcggccggtcgcgcccggctttgcccggctgcggcccgctttgcgccggcggcacctgccgctccagattgcctttgttgtaatcctcgagcagcgccagcagcggatcctgaacatcggtagcgttggcggggtagagatccatcaccagacgctctttaaagccggccaccggcgcgagggcaaacagctgcggcttaacgttctgcttgagttcgaagaccatgcgcacggtttgcggatcaaactggcccacccgggcggacttaataaagggatcgtcagcgcggatctggccccccatgcctttcagcacagagttcaggttaaccccttccagatccactaccactcgttccggattactgagggcaaactgccggtatttcagcacatgattcgattctaccgtgacacgcgtgtaggtcgatgctggccagacgcgaacggcgaccacccgcgcggcggcggccaacccgacagggctcacgctcattaaccacatggcgcccgcgccctgcaacagacggcgacggcttaatcctgagttgtttcccgacatgccactcccaagcaataaaaacgcatttatacccaaaacaaacagattgaccagaaactttaacgaaaggcatataacctgtcatctataaaagggtaaacattcattgacaccctgcgccgggtcacatgtttttcgcggcttagcctcaaattggggcttgcgtttaacggcaaaacagaataaaaatacaataattacgaacaatcatgcattgagggtttgtcatggtgaaggaacgtcgcactgaactggtagaaggattccgccattctgttccctatattaatgcccatcggggaaaaacgtttgtcatcatgctgggcggcgaagccattgagcatgaaaatttctcaaatattgtcaatgacataggattattgcatagcctgggcattcgcctggtggtggtctatggcgcccgcccgcagattgacgctaacctcgccgagcaccatcacgagccggtctatcacaagcagacgcgagtgactgacgccaaaacgctggagctggttaagcaggcggcggggatgctgcagctggagatcaccgcccgtctgtcgatgagcctcaacaacaccccgctgcagggggcccatatcaacgttgtcagcggcaactttatcattgcccagccgctgggcgtcgatgacggcgtcgattattgccacagcggacgcattcgccgcattgacgaagaggcgattcatcgtcagctcgacagcggcgccattgtgctgatggggccggtcgcggtgtcggtcaccggcgagagctttaacctgacttcggaagagatagctacccagctggccatcaagctgaaggcggagaaaatgatcggcttctgttcgtcgcaaggggtttacaaccaggccggggaaattgtctccgaactgttccctaatgaggcgcaagcccgcgtcgaagagctggaagcagacgaagactataactccggcaccgtgcgcttcctgcgcggggcggtgaaggcctgccgcagcggcgtacggcgctgccacctgatcagctatcaggaaaatggcgcgctgctgcaggagctgttttcacgcgacggcatcggcacccagatcgtcatggagagcgcggagcagatccgtcgggcgaccatcaatgatatcggcggtattcttgagctgataagcccgctcgagcagcagggcattctggtacgccgttcccgcgaacagctggagatggagatcgacaaattcaccattattcagcgcgataacaccaccatcgcctgcgccgccctctatcctttcccggaagagaagatcggcgaaatggcctgcgtggcggtgcatccggattaccggagctcgtcgcggggagaggtgctgctggagcgtattgccgctcaggccaggcagatgggactgagcaaactgttcgtgttaaccacccgcagcatccactggttccaggagcgcggcttcacgccggtggatatcgacctgctgccggagagtaaaaagcagatgtataactatcagcgccggtcgaaggtgctgatggccgacctcgcttaagcccttctcctctctatctaacggcccgggatagcgcgacgcttatcgctttatccccggccggtctcccgcccctcttcccgccagcctggcgtacgcacgcgggcgaaattcctggtttccgcgcaggccatttctttctcgctggctcaccgatatgctattggctgtcgacaggacgtcgactggcgccgcggccgccacccgcccagcaaggatcgcttaaagaatggaaaccaaaccgaactggctggtcagacatattaatctcattaccaccgcggtcgccctctatccgtggttgctgatgatactgctcctctgggataaccagcgccatcatcagcatggctatgccgcgctcggcgccgccatcgcgatattatttctgctggccctgacgtccggcatgaatcttctcatctcctcgctggtgattttttgtgcccgctgttccaccccaccgctggccggcggcgcagcagtccgctttttcgccatgaactcgatctcggcgctctggcttatccctctgttcttcagttactgatttttccgccagcccgggcaacggctgcagcattttccatcgcccggacccggcgtctcagggggcttcgcgcccggcgaaaatctccgccaggccgctgcgccgttcggtgcgcgtcacaatggcctgggagagcacctgctcgtcggcatagagcgacaaccgccgtttcgcgcgggtgatcgccgtgtagaccagttcgcgggtcaccagcgggacgctgcgcgccggcaggatcagcgccgcgtgttcgaactccgagccctgcgatttatgcacggtcatcgcccaggcggtatcatgctccggcagacggctcggctgcaccgacttgatggcgccgtcgggcatcaggaaccacacccgcagctcgccgttgcgctccagggcgatgccgatatcgccgttaaacagccccagcgcgctgtcgttgcgcgatatcatgatcggtcggccatcataccagcgagagtggcgcggcagggcgatcgcccgctggcggttgagccgctgctccagccgctcattgacgccgctcacgccgtacggcccctcgcgcagcgcgcacagcagctggaattcgctgaaagcggccagcatggcctgcggttcggcccgctcgcggcgcagctgcaggtagcgctcatagccctgctgagccgcgccgagcatggcttcgtactcttcggtcgtgctgaggggatgaagcgcgatatcgtcaaacggctggcgcagcgtggccttcacctccgcgcgcgcgccagcgttcaccgcccgcgccaggctcccgatgccggagtgactgccgaagcgatagctcttttgcagcaggcacaaactgtctctcagcgcgcccgcgatagccccctcgcccgccggcaccggcgaaccggtcagccgggtcagctcctgcgcccgcgcggcggtatagcccgaactcgcccaggcgcagatatcccccagcaccgcccccgcttctacggaggccagctggtcgcgatcgccgaggaaaatcacccgcccgtgggccggcagcgcgtcgataagccgcgacatcatcggcaggtcgatcatcgaggcttcatccaccaccagcacgtccagatgcagcgggttgccggcgtgatagcgcatccgctggctgcctggctgggcgcccagcagacgatgcagcgtgctggcctcggtgggaatcaacgctttctgcgcgtcggtcagcggcaattttctcagcgccgcgcccagcgattcggtcagacgcgccgccgctttcccggttggcgccgccaggcgaatacgacagcgcgggctgtcttcgatctggatcagcgccgccagaagcttcgccacggtggtggtcttcccggtcccgggaccgccggagatcactgagatgcggcgggtcagcgccaccgccgcggccactttttgccagtcggtttcgccggtggcagggaacagggcattcagggttgacgccagccgggcctcatccatctccagcacccggttggcttcattgaagaagcgggcgacggtcagctcgttgcgccacatccgattcagatagagccggtcgccgcacaaaatcatcggcgccggagcatcgccgcagctcaccgccgacgaagcgagcagtagcccgggccagtcctccggcgcgccggcttcggccagcagccgatcgcggatctcccccgctttaccgctcagcgcctcgtcgccgctcaaccgcgagagcggcagacagacgtgcccctcgccggcatcccggctcagcaaggccgccgccagcttgaccgccggcgggtcgttttgcgccaccatcagggcaaactggacgtccagcggccgcagcagacgctgctccaccgccgccagcagtagttgttcgaaagtcatgaggcctcctcctgagtttctccggcaaaaagctgatccagaccgtcaatcagcggtcgcaccggccgggtggtgaagatcccctgccccccctcctgcccgtccatgccgcgcaggaaaagataaatcacgccgccgaagtggcggtcatagtcataatcggccagccggtggcgcagatagcggtgcagcgccaggctatacagctgatactgtagatcgtagcggtgggcacgcatcgcctgctccatcgccggccgggtgtaggcctcgcgatcttcccccagccagttggatttgtaatccagcaggtaataacggccttcgtgacggaagaccagatcgataaagcccttcagcatgccgcgcacctggcggaaatccagcggcggcgtgtcggcagagaggggatcgtactggcggataagcgcgtcaaggcgctccgccgtcagcagctgggcgatgggcaggtaaaatgccatctccacctgtttatcccgcgccgcaagctgattgagcgcgatatccggccccggcaggcgggtcttcagcacgccccccagccagtcggtcagcaccggcgcccactgcgcgtcaaacccgctcagctgcagcttctccgccatccacccttccggcaccggctgggtgaagtccagctcctcaaacaggctgtgcaggaaggtccccggcgcggcgccgcgcgggaactggtgcggagtcagctgcggctcttccacgacttcgccgacgccggcggcatcaacatccagacgcggcagcaaatcctgcccgccgctgaaaccatgctgctgcagtccggagtaactggtcacccgccagtcgtcggcgatgcggcgctgcagctcgcgcgccgacaatcgcgggatggtcgccgcgggcgcctgccacggggtgagatccagttcgcccggaatctgtaatgcaatatcgccatgacagaagtccgccagccgcgcagccagcccggcggcgtccatggcttcgcccgcctgcagcagccgtcccagcgcgctgaggtggaaatcgctgttgccggatttccggctgctgagcggcgccacgccgaggctgcagtgccagaccgcgcgggtcagggccacgtacagcaggcgcagatcttccgccagtcgttccgcctccgccagctcgaggctggcctcatcctggcccagatccagcaccgccgcgaacgtctcgcgatcgtggtaaaacgcctggtcctgtttacgaaaccgggcgataaacggcagccagaccagggggtattccagcccttttgacttgtgaatggtgacaatttgcaccaggtgcttatcgctttcgagacgcatctgctggctggcggcgttgctgtccggctcggcgatatgctgcgccagccagcgcaccagggcatgctcgctttccagctggctggccgcctcctgcagcagttcgctgatgtgcagaatgtcggttaagcgccgctcgccgccgcgtgtcgccagtagattctcggctatatgtcgggctgtcatcaacgcccgcagcatcggcatcactccgcgctgccgccaaatctggcggtattcgctaaactcttccaccagcgcgtcccacgcctgctcatcctggttcaggttttcaatatccagcgcggtcaggccaaacatcgacgtcgccagcgcgctgcgcagggtattttcccgctccggggccagcaccgcctgcaatagccagagcagctcctgggcctcaagcgtctcaaaaacgctgtcgcggttggagaggtagactgagggaatgcccagcgtctgcagcgcttcacgcacctgcgccgcctccagccggttgcgcaccagcacggtaatatccgaagcctgtaccgggcgcgaggtttccccgcgccacagcagcgcgcgcccccgctgaccggcgctcagccagtcgcggatctgcgtggcgcagagctgcgccataaaggtctgataatcgccagacccgacagtgtcgccgggcatcagccagacgttcatcgccggtacgtccgccgcgtcaacggtaaagcgcagccccttgttcttcgccgccgccttcaccggcaggaacgggatctcgtggaacatgaaggggttatcgctgaggctgaacagccgattgacgctgcccaccatgcccggcgaggagcgccagttggtatcgagggtgtagtgcgcggcaacgtcgccgcgcgctttcatataggtaaagatatcggcgccgcgaaaggcgtagatggcctgcttgggatcgccgatcagcagcagagccgtctccggctgccggcgccagatgcggcgaaaaatccggtactgctgagggtcggtgtcctgaaattcatcgatcatcgccaccggaaaacgctggcgaatggcgctggccagcgtctcgccgctgtcgccgcgcagcgcctcgtcaagccggctgagcatatcgtcaaaccccagctcgccgcggcggcgcttttcgcgggcgaccgcatcgcggatctcgaccatcgctctcgccagcaccagatcggtgagcgtcagcgaggaggccagcaacgactctacggcgctaaacaggggatgcaccggcggttcgccaccggctttggtgcgctcgagcagaaacgactgggcaaatttctccagcgcgtcgggcagttggtagcttaacgtctcttcctgcgcccaggcgttcactttctccatccacttgccctggttgccgcgattaaacttccgccggtcaaggccggaattttccagcacgccttcgatctcgcccacctgctcgcgccactgctgcttgagcgagtcaatgcgggcgatgatctgctgatggcgttcggccagcgtctcgttaggggctggcggcgacttaagctgcggcgcttcgccctgcagccagcggtcaagggacttcagcagatcgcgcggccctttccagacgtcgtggatcaccgccgcgatatcgcgggtcaggggatagcagtggcggcgccagaaatcggcgcaggcctgatagcgcaggcgggattcatcctcgatcagctgttgctcgaacagcatgcccgactcgaaggcgttaaggctcagcatccgttggcaaaagccgtggatggtgaataccgccgcctcgtccatctgccgttcagccagcagcagcgtcttcgcggcgtcgtctttatcggcgatctccgccaacaacgcgctgtagagcggattgtcggattcgccgcgcaggcaggcgatgcgcagttcgtggatgttgctgcggatacggccgcgcagctcttcggtcgccgcctcggtaaaggtcaccaccagcagttcttcaacgctgatggcgcggggataggcggcctcaccgcccagccccaacagcagccgcagatacagcgcggcgatggtaaaggtttttccggtgcccgcagaggcttctatcaggcgctcgccgatcaggggcaagcgcaggggatccaaagactcagcggtgtcggtcattcattctctcgcatcaggggtaaggattgctgcaatgcgctgacgttttcccacactttgccgcctttcggctgggcatagtccgctttgccattctggctaccggaaatctgggacaagatcgtcatgccctgcggatccaccaccgtctgatggaagaagtcggcaagtttttgcggcgtcagcagtttaatctgagccactactttatcacgtgaatcaaaacgcatattaccgcgatcgaaatctttgctcagtttcgaggcttcatcgcccagcgtctgcggcgcctgcagcatctggcttatcaccgcctgctggagctgagcaaactcttccggcttcatcgcccgcagcttcgcctccgcggtggggaagaaggcctggaaccgctgccagaggaaggccggctgcttatcgctactctgcagcaggaagcccatgccccactggcgccccacgttcatcgggaaggcaaagaccgcgtagccgagctgctcttcagtacgcagctggttgtagaaccacggctgaatgatctgccccagcagggtgctggcggcggtgctactgaactcatccacgttgggcggcgcaaacaccgcggccagcgcggagtcggtgctgttgcccgctttattgaagatcgccagctgctgccgattcaccaccacgtctttattgcggcaccattcgttgccgtcagcgcccagctgctgctggatctggcgggccagcgtcgtggcggcatcggcggtcatattgcctatcaccatcagttcaggacgccccctggttttcaggttggcgcggtagttgagcacctctttaagggtaatggagggcagcagcgcccggcgcacttcgcgctggaagtacggcacctgcgagaccatctggatcggcataatcgcctgatcgtaggctttgcctttctcggcggaatccatcatctgcgcataccaggatttggcctgctccagctgctcctcggtcggcgtatagctgaagtatccctgcaacagatcgctgaacagcgccggaagatgctgggtatagccgttggcattgaccattaatccgttattagcgccggtagagaacgaaatgccgccgaccgccgcctggttactgagctggtcgagggcgatgccggcgagataatcgttgagggcaaacatcacctgccggcgagcgctgtccatcgcctgagggttacgcagcaccagggagatgtccgccttcggctcgctggcaaaatactggctcggggcatacaccacccgcagcgtcggttcatccaggatcagctgcggatgcggccaggctttatcgcttttgataagggtgaagtcatccggaatataggggttgagcgccggcagccgcagctggatggcctgcgatttgtgctgccagtcagcgaacgtctgctcgctaatcttatccacctgatacggcgcatcgacaaagtaggccgtcttgttatgcggctcctgggggctgatataccagatacgggcgttctgcggggtcatcatcgccagccggtctttgatcgcctgcgggtcgtactggtcggcaatattcaccacgtccagcgcatgctcgaccggcacccggatcatggtgtccgccagccattccacgtagtccatgtcgcggttgatcgacggatagcggaaatccagcgccagcacatgcgccagttcgtcgaaatagcgtttgtcgatgccctgagtacgcaggaggtcgaggtagctgaaaatggccgccgtcacttcatcgcggtgcgccaggcctttgtcggtgagggtggctgagatcgccagtacgccgctgttgccgtttaccaccggatcggaatcggcgcggataccttccgccagaccctgtttttgcaaccagtcagagagcgtgcccgggctgcggttgccgataagataggtgaccagctcatcggttttgctgcggaagcgatcgctgttgttgtcgatgcgaaactcgacgcgcagcactttacgcggcatcgccggcacatagtgaataatgatgcctttttgcgcatccgtgaccaccgggacggtaatttccggcctgctgatctgacgattcggcacgcggccaaaggtgtccgcagccatgcgcgccagcgccggcaacggcttgttgctgtagatcaccgctttcatcagattggcggagtaccagctatcgcggaaggtgtgcagcgcatcaagcaccgggctgccgggcttatcgctgagcgtctcgaggttgccacccgagaagtgggccgccgggtgagccgggttgatggtctccgcgctgacctgggccatgcgcatcccgtctcgcgtccgggccatcgtcagctcggcgttgaccgcgttacgttcgcggtcggcatattttttatccagcagcggcgcggcgatggcgtcggccaggcgatctacggccccgtccagcgcatcattttccacttcaagataaaacgcggtgcggtagggcgcggtactggcgttatggctgccgccgtgcagcttaagaaactctgcaaggctgtcaggctggggatatttttgcgaccccatcagcgtcatatgttccagaaaatgcgccagcccctgatgatctgccggatcctgcagggatcccaccggcaccaccagcgccgacagcgatttcaccgcctgcggatcggaaaccagcagcacgaccatgtcgttatcaaggcggatcgcctgatactgacgcgtatctttttcgcttttgcggatcgtctcctgaatcggctgccatccggtgtcggcctgactaaacggcgcccagagggcggccagcacaacaaaaaccttgaaccataaactgcggggcattcacgaacctcatcattaacaaacttgcgctgcacagcgtgcagccttttatgtccatcagtccgtgatacgttgcgcatattaaatgaaccgtcattcactgcgcaatttttatactatttaaatttgtgtggaccgatggtaacgatatagcggtaacagataacgctgcgtctgggcaatgatttcttcgtaatgcgccggctccagcgaacgccacaggcgttgataccagatatcggcgccctccccgctgaccaccatgttcccttcgtaggtctgcaggaatttgctccgcgctttctgctgcgtctcttcgtccattaagatgacatccttttcggcgtcgtaacaggctttcagccaggcgccaccgctttccggcagcagcagcagcggctgcgacatccccagcaaatagccatccaccagctcgttaaggtacgcctgcgcctcggcgggcgccagcgccggaaagcgccactctccctctttccgcacaaacagccggctctcgccggtgccgccgctggagcagtagacaaggtgttccagccaaagttgcatcccctgggagacgctcagcagcgaaggccgccagcgcagcagaccgtccggctgcacctgctgcagccagccggtcaggttcacgccgccgcactgcagatcgatctccatgctctgcgcctgctggcgctcggccatcacccgctcggccagcgcctgcatctccaggcgctgcgtctcccagaccagctcgccaaaggcgccatacggcagctcgccggcggcgcgaaagcggcggaacatagccgagacgtcctgctcctcaataagcgtattgagcagttgctgattcagttgataacggctcagcccttcaagagtgaacggctcgtcgtctggaatatcgtcctcttcggcgcggaaattgacccgcaaacgctgctgaaagaacgcgcgtaccgggtgctgccagaagcgcagaagctgatcgaacggcaggctgtcaatcggcggcgcggtgagcggctgtataaaatcgctatgcgcctctccctgctggccggcggccgccagccattcacgagcgtagctcttgttctcgtcttcctggaaattggcaacgtcgaacggcatgcgcgtatgcagatgggtgatatgggctttaacccgcgcttcgctggcgtcgcagtcaagctcttcgtcaccggcgagacagtggctctggccgatataatccaccagctcctgcaccagcaccgaaggaaaacgctcgctgttgtcctggatcgaacggccgatatagctgatatacagcgtctgctcggcggacatcagcgcttcgaggaacagatagcggtcatcatcgcgccggctgcggtcgccgcgctgcggcttctggctcattaaatcaaagcccagcggcggtagcgtgcgcggataaaccccgtcattcatccccagcaggcacaccaccttaaaggggatcgaacgcatcggcatcagggtacagatattgaccgggccggcaagaaagcgctggctgatccgctgctgatcgaggcgctgggccagctcatcgcgcagcagcgtcagcggcacctgctcgccatactgcgcctccagaccgctatcaataaccgccagccactgctgctcaatcagcgccagcgccgcttcggtctcactgtccggcaggaaaaagtcattcagcagatcgcgacagaccggcagccactccgccagcggccgctgctgggccaggccgcgtcgccacagattaagctgcatcagcagcgacgcgaggttgcccaccagctcggcgatcaaaccgctggattcgtcatacggcagcaccgactgccattctccctcgcggctgtccatcgcgtagcccaacagcatgcgggtgaggccgaaccgccaggtatgctgcccggtcgccggcaggtccagctcacggacgttgtcgtcatccattccccagcggacgccggactcgttcacccactggcgcaggtagcgcagcccttcttccgtgatattaaagcgcgccgccagcaccgggacgtccagcagcgccagcacatcttcactggcgaagcggctgtccggcagtgagagcagcgtaataaacgcctgcagcaccgggtgcgactctcgggcgcgacggtcggagatcgcccacggcagccagcgatcgccgctggcggcgccaaacaccgcctgtatataggggctgtagctgtcgatatccgccaccatgacgatgatatcccgcggcgtgagcgtcggatccgcctccagcatcgccagtagcctatcgtgcagaacctccacttcgcgctgcggactgtggcagacgtgaatgctcagactgcggtcatccagcgtcagcggacgtttgtcgcgactgtgggcgaatgcctctgcgctctgcccggccaccgccgcgttgcgtagttcaaggatatccgactgcaggttatgcaacaggttatcgggggcgatgtcgacaaaagcgtccagctcctcatagcgctccagccccgccagcaggtagatatagtcgcgccccagtttcccccaggaggcgagcaacgggttgccgacatcctgttccccggcgtcattaaacaaccccggcgcctgctcggtgtcgcgaaacaggggtagcgcgcgcgcctcgcggtgatggcgccgctggcgcgacagcagcttcgccaggaacgccggatccttaatgtctccccagtagtagcggcaggggttggtaaacaatacgtagacatcgacatgcttacccagcgcctgcagcgcctgaagatagaccggcggcagcgcggaaatcccgcagatgaagacgcgcgacggcagcccggcgggcggttcgtccgctttttccagggtactgataaagcgctggtagagattggcgcggtgccactgcggctgccccagctcggcggtgtagctcaccagcgcctgccacagcggcgcctgccactgctgggcatcgccgagaccttccacccgctggccggcctcccagcgcatcagccactccgggcgatagacgaggtactggtcatagaggtccgccacccgggcggccagctgaaacagcttgcgcttgtcgccgtcatcactcagatactggcgcagcaggataaaatcgtcttcctccaggtgctgcggcaggagggtcatcagcttccagctcatgctctgcttgctgaaggcgctttcgcccggaatatctttcaggacgcgcacgaacatatcccagataaagctcgccggcagcgggaactcgatattggcggcaatcccaaagcgcgcggccagggtcatctgcagccactgcgccatgccggtactctgcaccagcaccatttcggcctgaaaagggtcatccagccgctggcgctcgacgataaactccatcaacgcctcgagaacatccagccggtttgagtggtatacccttaacataattgctcctgactactggctgaccgggcaatgcagccgggtcatctgcacccgctttgcaacgggtctactgatcgttaccgtgatgctgacacatctttgcctcgatgtctgcatacggcttacctgcccgcgtgccggcgacggcggcgcggagagctggctatagcgccacgcgtcgcgccacagttgacgggtctggttcaactggacaattccttgcgccattccgcgctgatagccgcccagcgcggtgaccgtcagcaccatcagcgccatcgccagcacggtctccggcaggctaaacccccgctgacgcttcagggcatttgacataagctcgcctctctgagcgggcaaaaatcgctccagccgtgggcggaaaaacgcacctgcccgccgcgcacctcgccggactgccagacctgcacctcgccgctggcgctgctgagcaccagtgaaccgtcgccgaagatacgcagacaggcgcgccagccctgcggcgcctgctcccggcaggccagcgccacctgcgccgaccagacctgctgttttccccactgcagcgcggaatgggctatcgccgtatcgcggatcgcctgcgtttcgctggcggtttgcgccagcagcacccgctgctgcaggttaagcccctcgagtaacaggctgccgagggtcagcaacaggagcaccatcagcagcgacgacattccacgctggcggatcacaggttataccccgtcacccgctgctcaacctcgctcgtcaggcccgtctgttgcgcggagcgcgccgccagcgtcacgctcagctccggcgcgaagcccggggtgacctgacgttgtaccgagaagcgcgtcaccacgatggcggccgggttggtgattttctcccatccgccgccgcggcagtcgctggccccgcgcagggtctccagcgcgccgtcgcgcaggcgaaagccggtgctctccgccgctgccgcgggggaagtttcccatctcccgttgctgttcgcatcccagcgcacaatcagacactccccgccagcggctagctccagcccggctccgccgcacgctccccggcagtacccggcgcgctgcagatgttttcccacggcatgcacacgctgccacagctcgttctccagggccagctgttcgccctggcgcagaatatgacgctgcagggcaggcagaaagcggcaggcccccatcagcagcagcgagccaatggccatggcgataagcgcctccgccagggaaaatccgcggcggctcactgacaccctcctgcgctgtcgctgcggcataaacgaatccgcccccagtgtgagatcacaatgctccagctgccggccgcgctctgcagccgcagattccccgcccaggcggtgctgcgcagaccataaaaccccagaccaggcgtaacgccagccagagtgatccccggccagcgcgggcgcagcgtgaaggatgtccccgaggcgcagtcaggcccctccccctccgcgctcaggcaccagcccacttcgtcctggccgacgcgaagcacgcggtcccggttgtaggcgttggcgtcatcgcgcagaaagagcagaaaatcccgcacctggacggcggtttgccacagtcgttgctgctgctgccagcgctgccagccgtacaggccgccgacgctgaggatcatcatcagtgtcagcgttaccagggtttccatcagggtgtagccatgttctctgttcatggcgtcgagtatgccgcggcgattggctctggcgcgacgacggaaaatagctttcccggccagatacgcaaaaaagctttgcatactcgacagaaggacatttttttgcgagcgtctacccaacttcgcccaccgcaaccacctgtggcctggggggcaggagaaaacaaccttctcccggtggtaacggaaagcgctcccatcgggtggtgcgaagggcataaaaaaaccggcgccatcgggcgccggttagtcaactctgctgggggttaaatcgccaccggcgctttaatgcccgggtgcggatcgtaaccttcaatctcgaagtcttcaaagcggtagtcgaagatcgacgccggcttgcgtttgatgaccagcttcggcagcggacgcggttcgcggcttagctgcaggttggtctgctcaagatggttgctgtacagatgggtgtctccgccggtccagacgaaatcaccgacctgcagatcgcactgctgcgccaccatatgcaccagcagcgcatagctggcgatattgaacggcaggccgaggaacacatcgcaggaacgctgatacagctggcaggagagcttgccgtcggcgacgtagaactggaagaaggcgtggcacggcgccagcgccattttatccagctcgccgacgttccatgccgagacgatgatccggcgggagtccgggtcgtttttcagctggttcatcaccgtgctgatctggtcgatatggcggccgtccggcgcaggccaggaacgccactgtttgccgtagaccggccccaggtcgccattctcatccgcccactcgtcccagatggtgacgttgttctcgtgcagataggcgatgttggtgtcgccctgcaggaaccacagcagttcatggatgatggagcgtaaatgacagcgcttggtggtcaccagcgggaagccttcctgcaggttaaaacgcatctgatggccgaaaatggagatcgtgccagtgccggtgcggtcattttttggcgtgccctcggtgagcactttctgcatcaaatcaagatactgtttcatggttcctcaagaattctgttgctgcggacggtggcggtaagcccaaaccatcataatgatacccgcaagcaccatcgggatcgaaagaatctgccccatgctgatgtactgcacccagccgccggtgaactgggcgtcgggctggcggaagaattccacgatgatgcggaacaggccgtagccaatcaggaacagaccggaaacggagccggtagggcgcggtttacggataaacaggttgaggatcaggaacagtaccacgccttccagcgccagctcgtacagctgcgacgcgtgacgcggcagcgcgccgtaggtatcgaacagcgattgccattccggatgcgtcggcagcagcgccaggtcttcggcacgggagcccgggaaaatcatcgtgtagtggaagctcgggtctacgcggccccacagctcgccgttgataaagttgcccagacgcccggcgccaagaccaaacgggatcagcggcgcgataaaatcggagacctggaagaaggtgcgtttggtgcgtctggcgaagataatcatcaccaggatcacgccgatcaggccgccgtggaacgacatgccgccgtcccagacgcggaacagatacagcggatcggcaagaaataccggcaggttgtaaaacagcacgtagccgatacggccgcccaggaagacgccgaggaagcccgcgtagagcaggttttccacttcatttttcgtccagccgctgcccggacgattcgcccgacgggtggccagccacatcgcaaagacaaagcccaccaggtacatcaaaccgtaccagtggagggagaccgggcctagagaaaaaatgaccggatcgaactccggaaaatgcaggtagccactattcatctgtcaccataaagacttgttattccgccgaaagtggacagcggtgatgatccatacccgaacaaaacgggcacgccgaaggaggcgaatcatagcataagccacaagagcgatccgcgccgaacgtgtaaaagatatgtatacggatgctaacagaatgccgtttccccggcggtcccctactttgccggagggtgcgagcagaggatccccgggttacggcttacgcctcacccgggctggcgctaccgcccgccgcggatcaggccgccgagaccgcgacgctccataaaggccgccacctgatggcgcacctcggcggtcatctgcgcatcgaggctgcgacgcgacagctcctgcgcctcttcgatatcaatgcggcgcagcagatacttcaccctcgccaccgagcggccgttcatcgacagatggcggtaaccgaggccgataaggatcgtcacgcacatcgggtcgcccgccatctcgccgcacaggcgcagatcgatgccaaagcgctccgcgtcatgggcgatcatcgccagcgcacgcaataccgcaggatgcaggctgtcatacatgctggcgacccgggtattgttgcggtcgacggccagcaggtactgggtcaggtcgttcgtccctaccgagataaaatcgatccggctggccagctgcggcagcataaagaccatcgacgggacctccagcatcacccccaggcgcggacgtgggatggcgtagccgatcatctcttccacttcccggctggcgcgatcgatcagccgacgggcctcatccacctcctccagactggtcaccatcggcagcaaaatgctgaggttgccggtggcggcgttggcgcgcagcatcgcccgcacctggatcaaaaagatctccggctgatcgagggtgatgcggatcccgcgccagccgaggcacgggttctcttcgctgatcggcatatacggcagctgtttatccgcgccgatgtccagggtacgcagggtcaccggtttgctgttaaacatctgcagcatgccctgatactgggcgacctgctcctcttctgaggggaagccgctctgcagcataaagggaatttcggtgcggtagaggccaatgccgtcaacaaagctgccgagcttctcttcgtgctccgggcttaagccggcgttgagcatgactttcacccgctcgccgcttttcagctccgacgcgcgctggagatcgtcctccgccaggcggctgagttcgttctcttcgctgataaggcgctgatactcctgcaacaggacaggttcaggatccaccagcagttcaccgcgatagccatcgacaatcagcgtatggccatgcagcagcgagggctgaatatcggcgcccatcaccgttgggatgccgagggcccgcaccataatagcggcatgggagttggcggcgccatcgcgcaccaccacgccggccaggcgatcctgcgacacttcggcgagggtggtggccgacagctcgtccgccacgaggataatgcgcgccggccaggtgttgggcccctgaatactgtcgtcgagatggaacagcagacgctggcccagggtacgcagatcgccggcccgctctttcaaatagccgtcgctcagcgcggcaaactgttcggcgaacttctcaatgatctttttgacggcccactcggcgacggcgcctttgtcaacttcggcaaacagctcgcgacgcaggcgggcgtcagagagcaggtgcgagtagagatcgaagatcgccgccgtctctttttgcgccccggcagcgtagcgtttgctgtagcgacgaaactcgttggccgcctcttccagcgcaccggtcaggcgttcgcgttccgaggcggtgtccagcgtcgaggcttcatacacctgctccatcagcggcaggctgacgtccatccagccctcggcgatcgccaccccggaagaggccggcagagcgcgaatgcgcgtttgacgatactggccgaacagggcgttcagctgggactgggagaggatcgccgccatctgggtggcgagggtgacgaggaaagactcttcgctttcatcaaactgacgcagctcgcgctgctggaccaccagcacgcccagcagctggcggcgctgaatgatcggcacgccaaggaaggcgcggaagcggtcctctttgacggcggggatatatttgaagctggggtgtttttgcgcatcggcgaggttgatgggttccgccaggcggccaaccagccccaccaggccttcatcgaacgccagcgcaacggtgcgcccgcgaggtttttttaacccgcgggtggccatcaggtaatagcagcgtcggtcattgtcagccaggtaaaccgagcagacttccgtctccatcgcctggcagacatccgtcaccagaatatccagcgcctcgtttaaacgcggcgcgctcgcgaccttctcgactatttctcgcaaccgagtgagcataatgtgcgtggcttaacctcttttacgtcgataagcaggcgcgttttgcggcttaggtgcgctctccgccagcgacatggtcacgctggcgaactctttcatcacccggcggtagacgtcgcgcttaaacgacaccacctggcgaaccgggtaccagtaactcacccagcgccaaccatcaaattcaggtgtactgctggtttgcatattgatgtccgcatcattgccgatcaactgcaaaagaaaccacttttgtttctggccgatacaaaccggctttgtgtcccaacgcaccaaacgtttaggcaacttgtaacgcagccagttacgggttgaggccaggatccgcacatctttacggcttaacccgacctcttcaaacaattcccgatacatcgcctgctctgcggattctcctggattaatgcccccttgcgggaactgccacgagtgctgaccatagcgccgggcccacatcacctggccctgacgattacagattacaataccgacatttgggcggtagccatcgtcatcaatcaccggactacctcaagataagcttcaatgtgaatgattgtttcacactcgccggaaacggtaaaccactctgttcgcacactgagaacggataacatttgaataactcacagtaattgccagagttataaacaatgaaagcgcgtgacagccgattttattcactttttctgtggatagagttgtgaagaagtacggaattaacccgggaaaacccagagtaatccgaacatcgcatcgctagcatctgaaaataatagtatcatattcataaagttagaatatattcctttcacacattacagcataacgtgacgatcatcacacatgcgatccgccgactgatgaaagatcgagcaatgtcgattttatccacagattacgcgcaggccaccggcagattttctctaaaaattcgattttcgtcgcacgtcaaggctgtaaatcgaaccagtagtgagtcttttccccagttatcccacttttctgtggataacatggtgtaagatcctgtttattgtcagtgaccagttctggaaaacccgtttacaccgttttcataagccgcatgatgagtttaaaaagccatataaatcatgagattggtatagttactcagaaaacggtaaactctatccacaacgcgcaaaattagcgctcactttttaaccaaaggtattaccctatgcccgctatcgctccgctcgcctcaccgccgcaaagtcaggaacagctgctggcccaggcccgccagctggccggctattcgctgggcgagctggcggcgctggcggggatccccattccgcgcgatctgaagcgcgataaaggctggacgggcattctgctggagctgtggctgggcgccagcgcaggcagtaaacccgagcaggatttcgccgcgctgggggtcgagctcaaaacgatccccatcgacagccggggacgcccgctggagaccaccttcgtctgcgtcgccccgttaaccggcaatagcggcgtcacctgggagagcagccatgtacggcataagctgcagcgcgtcctgtggatcccggtggagggtgaacgcaccatcccgctggcggcgcggcgcgtcggcgcaccgctgctgtggagcccggacgaagacgaggagcgccagctgcgcatggactgggaagagctgatggatctcattgttctcggtgaggtcgagcgcattaccgcccgccacggcgaggtgctgcagttaagaccgaaagccgccaacagcaaggcgctgaccgaagccatcggcgcccgcggggagacaatcctcacgctgccgcgcggtttctatctgaaaaagaattttaccgccgctctgcttgcccgccatttcttgttacaacacgattaattttttgttctgcgttgggggttgcatataattgctgctttctattttgcaggactttgaacaatgttatttgcatggataaccgatcctaacgcctggctggcgctgggcacattgacgctgctggagatcgtgctcgggatcgacaatattattttcctctctctggtcgtggctaagctccccaccgcccagcgcgcccatgcgcgccggatcggtttgatgggcgcgatggtcatgcgtctggcgctgctggcctcaatcgcctgggtcgttaagctgaccaacccgctctttaccgttttcggtcaggagatctcgtttcgcgatctgatcttgctgctcggcgggctattccttatctggaaagccagtaaagagatccatgaatctatcgaaggtgaagaggaggggctgaagaccaacgtccactccttcctcggcgccatcgtgcagatcatgctgctggatatcatctttagcctcgattcagtgatcaccgccgtcggcctgtcggatcatctgttcatcatgatggcggcagtggtgatcgcggtgggggtgatgatgttcgccgcgcgacccatcggcgattttgttgaccgtcatccttcggtgaaaatgctggcgctgtcgtttctgatcctcgtcggctttaccctgatgctggaaagcttcgacgtccatgtgccgaagggatacatctatttcgccatgttcttctctatcgcggtggagagccttaacctgctgcgtaataagaaaaacccgctgtaaaccacaaaattgcagcctggtcacaggctgcaaccctttttcagactttactgctttttatgtctcacaaatcaggctattaatagacgggtatggggtgcagctactgaagaggtgttgacgatgaagaaatgggcagtattgatttccgccgtaggactggcgttctcggtttccggttgcagcagcgattacgtcatggcgaccaaagatgggcgaatgatcctgaccgacggtaaacctaccgtggatgacgataccggtttaatcagttacgaagatcagcagggtaataaaatgcagatcaatcgtgacgacgtttcgcaaatcattaagcgttaatctttccctgtcggccccagcttctgttgacgctgcgcttaccgaccaccagtcttttgagaagagtcgggatataccaggacgccgcgggtttcacccaccgcccctcctcgtcacccggcttttttgattttttacttcctctttttctcaccctctgccatgttgatactcctttgtcggggaatgcctgaccttataaataaaaaggaagctggctatgcagtatcaccgtatcccacacagttctcttgaaatcagcaccctcgggctgggaaccatgacttttggcgaacagaatagcgaggccgatgcccaccagcagctcgattacgcggttgccaacggcatcaacctgatcgatgtcgctgaaatgtacccggtcccgccgcgcccggaaacccaggggctgactgaaacctacgtcggcaactggctggcgaaacgcggcaatcgcgaaaagctggtgctcgcctcgaaagtcagcgggcccgcgcgcaataacgacagcagcattcggcccaatcacgtcctggaccgcaaaaatatccgcgaggcgctgcacgccagcctgaagcggctgcagaccgattatctcgatttatatcaggttcactggccgcagcggccaaccaactgctttggcaagctgggctatacctgggccgacgccgcgcccgccgtgacgctgctggataccctcgaagcgctgaccgagttccagcgcgccgggaagatccgctacatcggtgtgtcgaacgaaaccgccttcggcgtgatgcgttatctgcacctggcggataagcacgacctcccgcggatcgtgactattcagaatccttacagcctgctgaaccgcagctttgaagtcggcctcgcggaagtgagtcagttcgaaggcgtggagctgctggcctactcttgtctggctttcggcacactgaccggcaagtatctcaacggtgcgaagccggcaggggcgcgcaatacgctgttcagccgctttacgcgctacagcagcgagcagtcgcagaaagcggtagcggcctatgtggatatcgccaaacgccacggcctcgatccggcgcaaatggcgctggcctttgtgcgtcggcagccgtttgtcgccagcaccctgctgggggcgacgaccatgacgcagctgcaggccaacgtggaaagtttgcagcttgagctaagcgaagaggtattagcggagattgaggcggtgcatcaggtttatacctacccggcgccgtaagaaagcaaagccccgggtaaggcttatacgccttacccgggctactgaagagcagatattggcgaccccctcgcccagtcaagcgcagcgcaagccgggaggttatttacgccgcccccagacccacagcgcggcaatggccacggcgaataccgcgccaaagcctatccccacggcgaccggtggaacgcccacgctcaccgccagggaatagagccccagcatcagcagcatcgccacgttctcaccgaggttctgtaccgcaatggcgttacctgccccgaccgaatgtttcccacgctcctgcagcagcgcgttcagcggtacgataaagaacccgccgaacaccccgagcagcagcagcagaccgaacgccggcagcagcgactgctgcaccgcaaaggctatcaccgcgataccgatcaaaatcccggccggcatacagcgcgacaccgtctccagggtcaccagcttcgccgccgccccggcacccagcacaatccccaccgccaccatcgcattaagataggtgggcatggcgttgctggtaatgcccagcgccaccggcacccagatcaccagcaggaaacgcagggtcacgccagcgccccagaacaggctggtgcctatcagcgaaaagcgggtttcgccgttgcgccacagcgtccggcaggcgctgaagaagctgtgcgtcattggcttaaaacgccacgactgccccggacgcgctgccggcagcctgggtatccacaggttagccactaccgccccgccgtagaccagcgcgcagacgatcagcgccgccagcacgtgccagtcggcgaggatcccgccggccatggagcccagcaggatcgccgcgatggtcgaggactccatcagtccgttagccttcactaacttatcgccggtggtgagttcgccgagaatgccatacttggccggcgaataggcggcggcgccaatccccaccagcgtatagccgataaacggattgacgccgaagcagatgcagccggcgccgagcagtttcaggccgttggccaccatcatcacccggcctttggcaaagctatcggcgaactgaccgacaaagggggcaaagaggatgtaagcgcccacaaacaacatctgcaggaccggctggctccactccggataatagagctgcttcatcagcgccagggtggcgaagagaagcgcattgtcgccgaaggccgacaggaactgggcgcagatcaccgccagcatccctttcgagtacagcgaagggttagtatgtactgactcactcatgggttgtttccgcctcgtcgaccatatttttcagggtgacatagtctggcttgccgctgccgagcaccggtagctgtttcagccagcgtatatctcgcggcaccgccagctccggtacgccgtgctggcgggcgtagcgcagcagggcttcacgagtcagttcattatcggtggtaaacagcaccagcgcctcgcctttgctggcgtcctgtttaatcgccgtggcgtgcattttgtccggcgacgcgccgagggccacctgctccaccatctcgagggagatcatctcgccggcgattttggcgaagcgcttcgcgcggccctgaatgcggacatagccctgctcgtcgaaggtaacgatatccccggtgtcataccagcccgcttccatctcgccgtgctggttttccgccgcaggcgcttccagcacgccggggttttccacccgcaggtagcctttcatgatgttcggccctttcagctgcagccgccccccttgatcaatgcctggcatcgccagcaggcgggcgtccatccccggcaggatgcggcccacggtgccgaccttcgccgccatcggcacgttaatcgagaccacaggcgcgcactcggtcacgccatagccttcgagaatgcgcaggccgaatttatcctgccacagctgtttggtgctctcctgcagcttctccgccccggcgaccacgtagcgcaggcggtagaaatcgtacggattggcgaaacgggcatagttggcgaggaaggtcgaagtgccgaacagcaccgtacagttgcgatcgtagaccagctccggcaccacgcgatagtgcagcgggctgggatagagaaacacttccgccccggtaagcagcggcgtcagcaggccgacggtgaggccaaaagagtggaacagcggcagcgccgacataaagcggtcattggcggtaaagtcggcgatagttttgatctgctcgacgttggacagcagactcttatggctgtgcaccacccctttcggattgccctcggaaccggaggtgaagaggatcatcgccgcgtcttccggctgctgcttaacctgcgccagacgcggcgccagcagatgagcaaaaatccacagtttgtcagcgagggtgatatcgcctttaagatcttccaggaatacccagcgcacctgggtcagctgctccggcaggtgccagagtttgcctttatcgaggaaggtgcgcgaggtgaaaatggtgttgagctccgcggcggctatcgcgctgctgagccctttcaccccggcggtatagttcatcatcgccggaatacgcccgcgggcgatagcgccgaaaatcaccgccgcgctgatgccggcgttaggcagcatcaggccgatcttctcgcccggctggctgtatttttccagaatgcgggcgacaaacagggttttggttagcagcttgcgataggtatccggctggaagttgatatcctccacgcagggtttgcgcgcgccgaagcggtcctgcgccgccagcagcgactcatacagggtttcccgcgggcgcaccgccatccgggcttccatcatgatctgatgcagcatctccccggcgattttgcgccggtcgcgggcgcgcggcgcctcgggcatcggcagatgggtgggcggcaggagatgcagctgaatacgcgggaacaggcgacgtttcaccagccccttcagccggctgaagggcgtcagttcggcgccttcaatacgcagcggcacaatggtcgcctgcgatttggcggcgacaaaggcggcgccgtcataaattttcatcagcgagccgctgaccgaaattcgcccttccgggaaaataaccaccggccgcccctgctcaatcaggcgcaccagatgtttgatcgacatcggcttggtcgggtccagcggcacaaaatcgataatcggcgtcagcgcgcgcataaaccagcgctggctgattgaggtatagaccgcaaaaaccggtcggaccggcaaaaacagcgccagcagaatgccgtcgaggaaagagacgtggttcggggtgattaagaccttttgctggtataaagcctgcgtgtcgccggtcagtctgacccggtataaccccttgaacagcagtctgaaaaatcccaaaagcataacaactccatgtgaccggttgatgagtcaaagcaggttacacgagaaggcatgggaaagcagtgcagcggggggattttcggaataaaaaaaacctgcgcatccgcgcaggtcggtgtaagacgttcagtacgaagagcgtacctgagaaactcacctatcaatacctctgggatctcgattgtcacgttttttggccgtaacgggccagcgggaaaacgcaagggagtgagcctaagtgcaacgaggtattacgattttcgctatctgtaacaacgccgatagcgggcaaaaaaaaacctgcgcatctgcgcaggctggtgtaagtaaagtggtcaacgtgacgttgactccacctatcaatacctctgggatagccagaatatcaaccggatccgcgaacaaaccagcgaacattcgcaacagcgcatcgcaaagtgtaagcaaaggtttgtatttccctgcgccggtttcaattaccgctcgcgtcaatgtaaacaggtcaccgataagcccgcgctgaatcacatttgcgccattccttcgccgccgcgccttgaatctgccgctctttcccgtaacatagcagtatgtaaacgcttaccctagaaaaggcatggtatggcgactattaaggatgtagcccgactcgcaggagtctccgtcgctaccgtctcccgcgtcatcaacaactctcccaaagccagcgaagcttcgcgtcagtccgtgggcgcggcgatggaaaccctgaactatcaccccaacgcgaacgcccgggcgctggcccagcagtcaacggaaaccgtcggcctggtggtgggcgatgtctccgaccccttcttcggcgcgatggtcaaagccgtcgaacaggtggcctaccgcaccggcaattttttgctgattggcaatggctaccacaacgtgcagaaggagcgccaggcgatagagcagctgatccgccatcgctgcgcggcgctggtggtgcacgccaaaatgatcccagatgaggaattggcggggttaatgaaacagatccccggcatggtgctgatcaaccgcatcctgcccggatatgaaacccgctgcgtcgcgctggacgaccgctacggcgcctggctggcgacccgccatttgatccagcaggggcacacgcgtatcggctatctgtgctcaaaccatgatatctccgatgcggaagatcggctgcaggggtactacgcggcgctggaggagagcggcctgccgtgcaacgaccggctggtcacgtttgccgagccggatgaaagcggcggcgaacaggcgatgaccgaactgcttggccgcggccgccactttagcgccgtcgcctgctataacgactcgatggccgccggcgcgatgggggtgctgaatgacaatggcatcgacgttccgcgggagatttcgctgattggcttcgacgatgtcctgatttcgcgctatgtccgcccgcggttgactaccgtccgctatccgatcgtcacgatggcgacccaggcggccgagctggctttagccctggcggagcagcggccggcgccggagatcacccatctgttcagcccgacgctggtccgtcgtcactcggtggtcgccccgcaggaaggcgataagtcatagcgatagaggtgcacggcggtggccgggtaatccagcccctcgccgatgtagcgccagccgaagcgttcatagaaatcccggcaggcggagtagagatagagctcccgaaagcccgcgcggcgggcataatcgatcacatgccgctgcagttttccggccagcccctgaccgcgggcggcgggcgcgacgtacagcgccgccagccagggaaacagatcctggcggctgatcaaatcgcagcgccagaggccaatcgtgccgagcaactgctcgccttccacggcaataaaggtcaacggcagcgcctccgccgtctggctatgctgcacaatgctggcgaagaattgccgcggcagcgtctcgccgccaaaggcctgccacagccagtcggtcacctgcggggcgtactgcggcgcagcgtacagcggcaggatcgtcataccagcttcccctgaaaaatcggcactgagtcgaacagatagccgtcaaagtcgggggcgtcctcatcggacagctccagcaggctgtttttgacgttttccagatgctgccacatcgcctgccaggcgcccatcacatcgcgacgccgcagcgcggcgagcagggtctgccggtcgccgagccatttcagccgccaggcgcggctggcaatatgcacattgaactgctgccacagcgggctgctgtccatctgcagccagatccgctctaccgtcgccaacagcatctggttctgcgtcgccccggcgagcaccagatggaacagacgagcgttatcctgcgcggtgtcgttgagagcgattgcccgctgctcctgttcaataatccgctttagattgtcgatatcggcgcgggtggccattttcgcggcaaaggcggcgatgttgctctccagcagctggcgcgcctggagaatttcaaacgggccgacgtcgctgctgagcagctgctcctcttcgctgtcgttctcgtggggaatgcgcatgacatacaccccggatccctgacgaatatccaccgtcccctgcagctccagcatcagcagcgcttcgcgcacgatggtccggctgacgccataggtttcggcaatatggcgttccggcggcaaacgcgacccgaccgggtagcgcccctgcgcgatctgggcgcgcaggtcatcaccaatctcctgatagggcttcttttccggcggaactatcgctttttccacaaaatcacctgtgcgttacatgcctgcgagtcaaatacgccgctatcttagcaaatattgcccccggctagcggtattcatcatcgatatccagcaccagttcacgccgttcgcccagttgacgaaaccagtgcgccgaggctttgggtcgccgggcgcgatggttttgcagatcgatttcgataagcccgtagcggtttttaaaggcgttcatcggcgatacgttgtcggtaaacgcccacagcatatagccctggcagttggcccctgcctcgcgggcgcgcagggtgtgccacagatgttcgctgataaaacgaatgcggtagctgtcatcgatgacgccttcgcggttacggaactggccttcgttttccacccccatcccgctctccgccacgaaccacgggatgttgctatagtcattttttatccgcatcgccatatcaaagatgatttgcgggtagatttcccagccgcgggaggcgttcatccgccggccgggcagctcaaacggctcataataccaggccggatggaacggggtgtgcggatgccaggcccgcgacggggctttgacccggtgcgggtagtaaagattaatccccagctcatcgacggtgtgctcgcggataaccgccagatcctcctcgctggtctcccacgtcacctgatgctgctcaagcagcgcgagaagctccggcggccagacgccgtgcaccagcgggtcgaggaacatgcggttgtagaacagatcgtagatctccgccgcgcgcaggtcatggggggcgcgtgagcgtgggtaggtcacctccggattgaggatgcagccgacggtcccgggatagccgagctcgcgaaaccgcttcacgacgctggcggtcgccagcaccttatgatagttccactgcatccaggtgctggtgttctgctcatagggccagcgcagagcatccagatagacccgggtctgcaccacaattggctcattaaaggtaaaccagcgcgtcaccttcgggtggtagcgggcaaacaccttctccgcgtagcgcacaaacagctcaaccaccgttttcgacccccagccgccatacttttccagcagatagccgggcaattcataatgctcaaggcagatcatcggcgtgatgccgttagccagcagcgcatcgaacagctggtcataataggccgcatactcctcatccaccgtgacgttttcatagtcggtcagaaagcgcgaccagttgattgaggtgcggtagtgggtcagcccagccagcttcatcagctgcacatcttcctgaaagcggttgataaaatcggtggccaccgccgggccatagccgttatgccagacgtggcgatcgtttttgtaccagagatcgggccaggagtcctgccctggttttttcccgctccagccttcggtctgccaggcggaagccgccgcgccaaggataaaatcatcgggaatggtcatccgtacggtagtcataggctcctcagacagggttggcggtttgttgattgtctacctgacgctgcgcggcatcggcacggcgggagacgattttgacgaaaggcagatagataagcaccgcgacgacgatgcagataagctgggtcaccaccgcccccatcgagccggcggtggagagccaggcgttgatcagcggcggcgtggtccaggggaccatcaccaccgccttgccggcgaagccggtcagggtggcgaaatagccgatgctgccggtcaccagcggggtgatgataaacgggatggcgaggatcgggttaagcatgatcggcatcccgaagatcaccggctcgttaatattgaacagccccgggcctatcgacagcttggcgatctctttcatctctttgcgcctggtggcgatcatcaccgcaatcagcaggccgatggtcagccccgagccgccgatgctcatgtagacatcccagaagggcatcgtgatgatgttcggtacctctttcccctgctcaaaagcgctcatattgacggtgatcgctcccagcagcagcggctcgcggatcggcttgatcatctggttgccgtgaatgccgatcacccagaacagctgggcgacgaacatcagcagcaggatccccggcaggctctgcaccacccgctccagcggctgctgcaccacctggtagaccgcatcgtagagatacattcccgtcagctggtgaaagagaaaaccaaaggtggcgatcgcggtggtggtgatgatcgccgggatcagcgcggaaaaagaggcagagacgttcggcggcacggtatccggcattttgatcttcagtcccttgcgcccctccagccagcagtaaatctccactgacagaatggcgatgaacatcccaaggaacagactgcgggtatcggaaaactggcgcagcaggacatctttcaccacgtgcatctggccatcgaccatcatctctaccgtggtcggcgtgacgcagataaagcagatcaccgccaacaggccgggaaacaggcttttgatgccgttgatccgccccagctcaataccgatcagaaacacggcgccgatattgaggaagttgagcgtagcgtagttaagcgcgctggtgatcggcttcagcgccgcaagaaaggagagcgaggaaaagctggcgagcccattcttcggatccagcaccatattggagatcagcaccgaaaaggccccgacgatgatcaccggcatcagggtaataaacgccgatttgatcgccataatgtagcgatagctgttgaatgtcgtcgcgaaacgccccagcgcgtcgatcagtttgtcctgtaatgccataaaagagtacctcagtgtaaagggcttattgcggccaggtgaacagccagagacttttggcataccaaaacatagtcgccaggcaaaaatagttctgtgacagcgctcgcaacgcgcacagtggtatcccaaatatccgataaaatcggcattggcataccagagtctgtcggctcgtcagttcctgccaaaagcgtgatcgcgatggtttttccgccccgccccgtcgatatgtcccttttcggtctgtgataaactgcgctttaccacgtgaaatcaggaatcgatgaatggctacaatgctggatgtctcaattcgcgcaggcgtctcgaaagcgacggtttcccgcgtgttgaacggcacaggtcaggtgaaagagagcacccgccaacaggtctttaaagcgatggaagagctgggctaccggcccaatttccttgcccgctcgctggccaatcagaccagcaatagtatcgggctggtcgtctccacctttgacggcttttactttggccgtctgctgcagcaggcgtcacgccagaccgaagcctggggaaagcagcttatcgtcaccgacggccatgatacgccggagcgcgaagaggaagcggtgcagatgctcgccgaccggcagtgcgatgcgatcatcctctatacccggcacatgagcgagaaggcgatcatgtcgctgattaactcgatcgccatgccgctggtggtgattaaccgcgatgtggcgcaggcccgcgaacgctgcgtgttcttcgaacagcaggaagccgccttccaggccgtggagtatctgattacccagggccaccgcgatatcgcctgcatcaccgtcccgatgcatacccctaccggccaggctcgcctgcagggctaccgcaacgcgctgataaaacatggtattgagtgggatccgagccgggtgaagtatggggactcgacgatgactcgcggctacgaactgtgccgggaactgctggacgagaaagcccgcttcagcgcgctgttttcctgtaacgatgatatggcgctgggggcgtcaaaggcgctgcatcaggcggggctgcgtattccacaggatgtgtcgctgtttggcttcgacgatgcgccaagcgcgaaatggctggagccggggctgtcgacggtttatctgccgatcgacaacatgatcactacggctatcgaccaggcgatcaagcttgccaatcagcagccgatagaaacgatcccgccgtttaccggcacgctggtgcttcgcgagtcggtgacgacgggacctttttttaaataagctctaaggccagcagctcctggatggtctggcgacggcggatcagccgcgccttaccgccatcaaacagcacctccggcagcagcggacggctgttatagttggacgacatcgaagccccgtaggcgccggtgtcatggagcaccagataatccccaggcgccaccgccggcagcaggcgggtctcgactttgcccccctcctgctgggtaaagacatccccggattcgcacagcggcccggccaccacggtttcgacctgcggcgcggcgctgagatcccggccatcccccgccagagcggtgatatggtgatagctaccgtacattgccgggcgcatcaggtcgttaaagccggcgtcaatcagcacgaagtgacggctgcccatctctttcacactgcgcacctgcgacaccagcacgccggactcggccaccaggaagcgtcctggctcaatctccagtttcaccgggtgccccagatgggccgcgatctgctcccgggcgcggttccacaggccataatagtgggcggtgtcgatggcctcttcaccttcgcggtaaggaatcgacagaccgccgccggcggagatggcctgcagatcctggccaaagtcgacgacctggcgcaccatcgcgccgcacacctgctccaggtgaccatagtcaacgccagagccgatatgcatatggatcccgaccagctgcagctgatagcgacgcatcacttccagcgccgccggcaggtggctgtaccagatgccatgcttgctattctcaccgccggtattggttttctggctgtggccgtggccaaagcccgggttgacgcgcagccagacgcgatggcccggcgacacctcgcccagctggctcagcatgtcgatcgagccggcgttcaccgggatctgtaacgccttcacccgatcgagggtggcgtcgtcgatcagatcggcggtgaagacgatatcctcgggattctgctgcggatcgtagcctgccgccagcgcccgctcgatctcccccagcgacaccgagtccaccttcaccccctgctcacgcatcagacgcagaatatgaatgttagagcaggctttttgcgcaaaacgcaccacgtcgaactggctgagctgggcaatctggcggcgaataatctgcgcatcatagacccagaccggacagccaaattccgcgggcaggcgcagcaggttgtctgcggtcaggtcagtatcggtggcgtaaagcgagtgtggcataagaactccggtgcagtgcgtgtgttggtcgctgttttttttcgattacgccacagtggcggacgaataaaaaatatcgttttatcgcgactctatgcaaaaatgatatggttccagccgagcctcacggagaccgcatgccagccgtcaatttgcgtcatatcgaaatctttcacgcggtgatgaccaccggcaacctgaccgaagcggcgcggatgctgcacacctcgcaacccacggtcagccgcgagctggcgcgctttgagaaggtgctcggcctgcagctgtttgagcggacccgcggtcgcctgcagccgacggtgcagggcctgcgtttgtttgaggaggttcagcgctcctggtatggcctggaccgtatcgtcagcgccgccgagagcctgcgcgagttccgccagggcgagctgtcgatcgcctgtctgccggtgttttcccagtcctttctgccgctgctgttgccgccgtttctcgctcgctacccggaggtcagcctgcagatcgtcccccaggagtcgccgctgctggaggagtggctctccgcccagcgccatgaccttggcctgacggagaccctgcatacccccgcgggcaccgaacgcaccccgctgctgacgctgaatgaagtctgcgtgctgcccgccggccatccgctggcggcgcaggcgacgctgacccccgccgattttcagggcgaaaactacatcagcctgtcgcgcaccgacagctatcgccagctgctcgacgccctgttccttgagcatcaggttaaacggcggatggtggtcgaaacccacagcgcggcctcgatctgcgccatggtgcgcgccggcgccgggatctcggtggtgaatccgttaaccgccctggactatgccgatagcggcgtggtggtgcgccgcttcagcgtcgaggtgccgtttaccgtcagcctgatccgccctctccaccgcccgcgctcggcgctggtcgacgcctttgttgcccacctgcagcagagtctgccgcagatcctcacgccgctggcgtcggtcctgcagagagcataaagttgaccgcgtcttccgcgtggatcgccgcggtgtcaaagaccggcagcgggctgagctcggcaggcaccagcaggccaatctccgtacagccgaaaataaccccttccgccccctgctccgccagggcggcgatcgtctgcagataataatcccgcgacgcctcgctgaaggtgccgagacaaagttcgtcgaagatgatctgattgatctgcgcccgatcgtcagcctcagggatcagcgtctcgatggcaaactgctcctgcagacgaccgcggtaaaaggtctgctccatggtatagcgggtgcccagcagcgcgacccggcgctgacctttggcggcaatcgcccgtccggtggcatcggcaatatgcaggaagggaacctggcagcgggcggcgatggcatctgcgactttatgcatggtgttggtgcacaggacaatgccttcggcccccgcctgctgcagcccgaccgcggcctcagcaaggatctccccggcgcgatcccagtcgccggcggactggcaggcttcgatgtcgtgaaaatcgacgctgtgcagcaccaggctggcagagtgcaggccgcccagtcgcgccttaacgccctcattgatcaaccgataataggggatcgtggactcccagctcatgccgcctaacaggccaatggttttcatcttctgctccttatgtcgtttctgccagtgaagcaaacttgtgatcaactttccacttctctggccgcgtatttctttttcatgaagagtgggataagttaaatgaaacaatgtttcactttaacaacaggatcgcccgatgtttatttttcataaagacaccacccttgaagacctcggcaatggcgtaacccgccgcattctggcccacgacggcaaaatgatggccgtggaggtgaattttgccgccggcgccgtcggcccgatgcataaccatcctcacgaacagctcacctatgtgctttccggcgagtttgagttcaccatcggcgaggagacgcgcgtcgtcagcgccggcgatacgttgtataagcggccggggattatgcacggttgcgtctgcctgcagcccggcacgctgctcgatacctttactcccattcgcgaagattttcttgaaggctaatccataacgggggcgttcgccgtccccggttactgcccggcgcccttcaataaaaagatgctgtcacaatcattatcctggtaattatatttcccgctcagttaagcctaatttttcattcctttcagacgccctttacggccaaaatgcttaccacctcacctttttgaaacatcgtttcgactttgatcacatttccatcctgatctgcatgacgcagaaacaaatcgcaataaaatgaaattaaaacggcgttttataaaaaacagttcagcataaaaaaaggggctgacagcccttacctgctagaccagttaaagaataacccattaattaacaatgacatgttaagcagaggaagcgttcagacatttttgcgttgtcaggcgtaaaaggccgacagcgcggcgtcaccggatccgtattacaactcgtaagccaggtaggtatgtatgaatgaaaacaagctgctgggattggcatggatatcgccctatatcatcgggctgatcgtctttaccgcttttccctttgtttcatctttctttctcagttttaccgagtacgacttgatgagcccgccggtatttaacggcatcgaaaactatcgctatatgttgaccgaggatagcctgttctggaaatcgatgggggtgacctttgcctacgtctttttaaccatccccttaaaactggctttcgccctcggcattgcttttgtgctcaatttcaaactgcgcggcatcggctttttccgcaccgcctattacatcccgtcgatcctcggcagctcggtggcgattgccgtgctgtggcgcgccctgttcgccattgacggcctgctgaacagttttctcgccgtctttggcatcgatgccatcaactggctgggggaaccctccctggcgctgatgtcggtcaccctgctgcgcgtctggcagtttggctccgcgatggtcatcttcctcgccgcgctgcagaacgttccgcagtcgcagtatgaggcggcaatgattgacggcgcctcaaagtggcagatgttcatgaaggtcaccgtgccgctgatcaccccggtgattttcttcaactttattatgcagaccacccaggcgttccaggagtttaccggcccgtacgtgataaccggcggcggtccgacctattacacctacctgttctcactctatatctacgataccgcctttaagtacttcgacatgggctatggcgccgcgctggcgtgggtgctgttcctcgtcgtggcggtctttgcgtcgatcgcctttaagtcatcgaaatactgggtcttctactccgccgataagggaggcaaaaatggctgatattcaacagatggcgccggtgatgagcgacgccgatcgtgaggtcgcccgtacgctgcgccgggaaaaggtgagccgggtggtgcgctacgtcgtgctgatattcgtcggcctgctgatgctctacccgctggcgtggatgttctccgcctcgttcaagccgaaccatgagatcttcaccaccctcgggctgtggcctgcccacgccacctgggacgggtttatcaacggctggaagaccggcaccgaataccatttcggccactatatgctgaacacctttaagtatgtgatcccgaaagtggtgttaacgatcatttcctccaccatcgtggcgtacggcttcgcacgctttgagatcccgtggaagaagttctggttcgcaacgcttatcaccaccatgttgctgccgagcaccgtcctgctgatcccgcagtacctgatgttccgcgaaatggggatgctgaacagctatctgccgctgtacttgccgctggccttcgccacccagggattcttcgtcttcatgctgatccagtttctgcgcggcgtgccgcgcgatatggaagaggcggcgcagatcgacggctgcaactccatccaggtgctgtggtatgtggtggtgccgatcctcaagccggccattatctcggtggcgctgttccagtttatgtggtcgatgaacgactttatcggtccgctgatctacgtctacagcgtcgataagtatcccatcgcgctggcgctaaaaatgtctatcgacgtcacggaaggcgcgccgtggaacgaaattctggcaatggcgagcatctccattctgccgtccatcattgtcttcttcctggctcaacgctacttcgtgcagggcgtgaccagcagcggaatcaaaggttaagagggaaatatcatggctgaagtgattttcaacaaactggaaaaagtctactccaacgggtttaaagcggtgcatggtatcgacctgaagattgccgatggcgaatttatggtgatcgtcggcccctccggctgcgccaaatcgaccaccctgcgcatgctggcgggcctggagaccatcagcggcggcgaggtgcggattggggacaaaatcgtcaacaacctggcgcctaaatcccgtggcatcgcgatggtgttccagaactacgccctctatccgcatatgacggtgcgcgaaaacctcgcctttggcctcaaactaagcaagctgccgaaggcgcaaatcgacagacaggtggaagaagcggcgaaaattctcgaactggaagaactgctcgatcgcctgccgcgccagctctccggcggccaggcgcagcgcgtggcggtgggccgggcgatcgtcaaaaaaccggacgtcttcctgttcgacgaaccgctctccaaccttgacgccaagctgcgcgcctcgatgcggatccgcatttccgatctgcataagcagttgaaaaaatctggcaaaccggcgaccaccgtctacgtcacccacgatcagacggaagcgatgaccatgggcgaccgcatctgcgtgatgaagctcggccacattatgcaggttgataccccggacaatctctaccaccagccgaaaaatatgtttgtcgccgggtttatcggcgcgccggagatgaatattcgtcccagccagctggttgagcacggtggtcgcctgtatttgacgctgggcgatcagcggctgccgctcaacgatcggctgcaaagcaaagttgaaacccataagaatcagcaggtgttctttggcgtgcgcccggagtttgtctctctctccgatgaaccgtttgccgaaggttcctgcgcgggtgaaatggtacgcgtagaaaacatgggacatgaattctttgtttatctcagggttgctgattatgagctgaccgcccgcgtgccgtcggacgatgcgaagccgatgattgccaagggactgaatcgcaaagtctatttcacctttgatctcaacaagtgtcacatctttgacgccaaaaccgaacagaacctctctctgtgaaccctggagcataacaatgaaaaacgtgctgataagcgccaccctctccgccaccctgggccttagcgccttctcttcgctagcgcaggatgtcgacctgcgtatgtcctggtgggggggcaacggccgccatcaggtcaccctcaaggcgctggaggaattccacaaacaaaacccagacatcaacgtcaaagcagaatacaccggctgggacggccatctttcacgcctgaccacccagattgccggcggtaccgagcctgacgtgatgcagaccaactggaactggctgccgatcttttcgaaaaatggcgatggcttttacgatctgaataccctgaaagacgagatcgacctcagccagttcgacgccaaagaactgcagtccaccacggtcaacggcaagcttaacggtattccaatttccgtcaccgcccgcgtcttctactttaacgacgaagcatggaaaaaggcgggcatccccttcccgaaaacctgggatgaactcatggcggcgggaaaaactttcgaaagcaagctcgggaaacagtactacccggtggtgctcgaacaccaggacgtgctggccctgctcaactcttatatggtgcaaaaatacaatcagccggccatcgatgagaaagggcgaaaattctcctacagcaaagcgcagtgggcggatttcttcggtatgtataagaagcttatcgacagccatgtgatgccggacacccgctactatgcctccttcggcaagagcaacatgtacgaaatgaagccgtggatccagggcgaatggggcgggacctacatgtggaactccaccatcaacaaatattccgataacctgaagccgccggcgaagctggtgctgggggaatacccgatgctgccgggcgccaccgatgccggactgttcttcaagcccgcgcaaatgttatcgattggcaaatcgacgaaaaacccgcaggcggcggcgaaagtgattaacttcctgctgaacagcaaagaaggggtggatattcttggactggagcgcggcgtgccgctgagtaaagcggcggtcacctacctgaccgaggatggggtaatcaaagccgacgatccggcggtgtccggcctgaagctggcgcaatccctgcccaccgctctgccggtctccccgtacttcgacgatccgcagatcgtcgcccagttcggcaccaccctgcagtacatcgactacggtaaaaagtcggtggaagaagcggccgaggacttccagcgccagaccgaccgcattctgcgccgcgcgatgcgctaacctgcccgtctgaactctcccgcggcgcacgccgcgggagggtctgccagacggccctgtcagaagaaatatttaaagcgcacccgggcgccgtagcgttcatcgggattcccgctcttcgctgccgtggaatcgagccacgaggcataggcgccaaggtaaatattgaagttcggcatcgccatgatattcggcaactgccaggaggtgtgcaaggtatggatgtcatagcgccccggcgccaggatagcgcaatcgccatcgcattcgctggtcaccccggccatattgaactggtcgattttattgtgcgcatagatatagcccagctccacgcgatgccaaagggcgttgatcccggcgctgaagtcggtttcgtccgccgcgtccagcagggcggtactcagattgaccaccgccccatcctgcggatcgcttttcagggtgttccagctcatggtcagcccgtagccggtgcggtttgactggtcgacccagcgtccgctctggctctgatagccgtaagcattgttgacgagattgctctctatcgccgcggccgccgaccagacgccggactgccatgccgccaccggccgcacgtacaccacatttttgcggttttccagcgcgttaccatgatagttctgatcgacaaacagcgaactgccgtcctccaccagggtgttaacttcgaaataccagttatccaccgttttgctaaacagaaggttaccgccgctgctgctgcgcccgcgcccctctttcatcatgtaaatatagccatagccatcggaatagagatcgttggcggtattacctgaatattcaataaaggtatcctgattcagcgggaacatatcccaggcttcaaagcggcctatttttattttccagtcatcctgctggccgaagaaaaataccgcatcatcaagattcattttgccatccatatccgccagaggctgcacgctgaatccggcatattgcccgtcggcgccattccgtctgccatcgaaacccagcagaatacgaccgttaatatcccagcgctctttatcgccgggcgcccagcttttattcgcgctggttttgaccgacgtcaggctgccggtgcgactggcgccatcgaggttaaattcgacgtcgccataaaattttaattcgccattgtcatttagctgcaaacgcggcgaagcaggcgccgcgcgggcgaccgtcgcggcctgctgctggcctttcagcgtcttaatttccgcctctgcgctggcggcgcgcgcctccgtcgcctttagccgctgctccatttgcgccagtcgctcctccagcgataacggcgcctgcgccataacggatggcagatacagagacgtcagaaaacacccgacccagattttattcatcggtaaacccttttattatggaatgaactgaattttttattaatgggtaacgcacgacgatgcaggcaataataacccgcccatcgtcaaagacgggttattaacgacaacagccttattattattcgagctgccaggcgccggcttcggttaatgccgccgcgccgctccaggcaaataacgctaattcacggcggggagcctgcggatagatacggctgctcaggcaggcttcgccgtcattgacaaaaacctccaccgaagagctatcgaaaaatattcgcaggttgagatccgccccggcggtcaacggcacgctgcgcgtcccgcacaggccatactgcggataatgccgttccagcaccagacgctgctgttgggcatccatgtagatgcgcaggccatcgccaaagcgcagaccatactgctcggcgctgctgcgggcgcagtcccagcgcagattcacctccatcgcctcgcagttgtcgaccatcgtcgtctgctggttgttcagggtgctgaccggccacgggaaccaggcgccgcgcaggctctccacttctttcgccgggcgcatctgcaggcggtcatccgcgctcaggctcagctcgcgcggcagggagagcatgcccgcccagccgtcctgctgctccggcagcggcgattcccacatatccagccagccaatcacgatccgccggccatcgggggtggagaagctttgcggggcatagaaatcgtggccgttatccatctcccggaattcgccatggcgaataaaacgctggcctggctgccactcgccgatcagatagccgctctggaacagattgcggttgctgaaccccgcggcctgcatcccctgtggggaaaacatcagaacgcgtttgccgttgagggtgaagaagtccgggcactcccacatatagcccatggtgctttccgcttcatccagcacccccgcgtcctgccactggcgcagatcggctgaacggtacagccgcacctggccggtatcgccttcgcgcgcgccgacgatcatgtaccagcagtctccttcacgccagaccttcgggtcacggaagtggtgcatacccggcggggtgtcgaccaccatcccctggcgctcaaagtggatcccgtcgcggctggtggccagacactgcacctgatacagattggcttcgtcgccaggatcgccgtggaacttatgcccggtgtaaatcagcgccagggtatcgccatcgaccaccgccgagccggaaaagcagccgtctttatcctccgggccctccggcgccagggctaccggcaaatgctcccagtgcaccagatccttactgcgcgcgtgcccccagtgcatcggtccccactgggtggagtacgggtgatgttgataaaaggcatggtaccagccgtcaaaccacaccagaccgtttgggtcgttgatccacccggcgcgggccgccaggtgatagtgcggataccagcgcagattaagcgcctggcgttgtgtctggagtacctgttcagcccgggagattgtgtaagtcatcattttcactctttttgattcagatagcggtaggttgcgacaccagcggatcggcggaggatttgccggagcgcaacaagaagatggaaataaaggtggtgcagaacaccagcaggcccatgatcaggtaggactgggcgaagccatatttttcatagctgtagcccgccagcggcgacaatacgctggcgataatcgagctggtgcaggcgaagcccaccagatagagggtggaggagagacgtttatcgaagttgaggctgttgtacttaaagatagccaccagcagtatcggcaactccaccgcgtgcagcagtttggtgatggagatcagcagcggcccctccaccagaccggaggccaccatgcgcatcgccatcaccatgccggcgaaaatcagaccgtttttggcgccgatgcggttcaccagccacggcgcgcagaacatgccggccgcctcgaggaacacctggaaggagttgaggtagccatacatctcattgccttcctgcagggtcgcgaactgcgatgagaaatagaccgggaactgctggtcatagacgccgtaaatgcaggtgccgatgacgaagaagaccagcgcccaaaagcgcggcagcgtcagcaggcgcagcgcatcttcgagggtcaccttaccgcccgataccgcctcctgcatcgcatgcggcgccgaggagacccgcagccgcgccaacaggataaagaacaccagcccggaacagctggcgacgaggaagtttagctgcggattgatgttaaacagcaggccggcgaagaaggtggccaccgcccagcccagcgagccccacatccgcgccctgccgaattcaaactggctctgacgcgccaccctctcggtgtaagattccagcacgccgatgccgccgttaaaggtcaaaccgatatagatcccgccaaaaatgctgcccaacaggacgttgattttcagcaggtggccgaacagcagatacgccggaccagagaggatcagcagcgcggtgatataccagagcagatgtttgcgcagccccagcttgtcctggataaatccatagcaaacttgcgcaaacagcgcggaaaccgacagtacggcatagataataccggtatcgcctgccttcagcccaacctcctggtgaagccagatagagagcaaggagccggatgacgaccaggtcacgaaaaagaaaaacagtaaggcactgagcaacgggtagctgtgtgagtgaggcgctttcatcatgacattctcgtgttagaggaatgcaattatggtaacgttaacaaaaaacaaaacgcaggtggattcgctgcgatatatgatgttaatcacaaaagttaacgttaacataatgaagatgcgatcgcgatcaaaaatcaaccgcaacatagctcacgacggcgatagcagaaaatcgtttcactcttttacatcagcgacttagttgtatagcctgtactctgcggcaatggcggaggaaaaaatggcgtccctgaaagatgtagcaaaactggcgaatgtatctctgatgaccgtctcacgggcgctgaacaccccggagcggctgaagcctgagacactggcccgcgtgcaggccgccatcgccgaaaccaactacgtccccgacctgtcggcgaagaagatccgcggggcgcgcgccacccccagcaccatcggcgtgctggcgctggataccgtgaccacgcccttttcggtggagatcaccttatcgatcgaagagacggcccgcgcccacggctggaacagctttgtggtcaatatgttttctgacgatcgtccggaagcggtggtcgacctgctcctctcccatcgtccggacggcattatctttaccaccatgggcctgcgccaggtaccgctgccggaaaaactgctgactctgccctgcgtgctggccaactgcgaaagcctcagccagccggtggccagctatatcccggacgatgaacaggggcagtacgatgcggtgaaagccctgcttgccgctggctatcgtcgtccgctgtgcctgcacttacccgccagccagccggcgacgatccgccgccgccgggggctggagcgcgcctgccgggaggccggtatcgaaccggaccatctgagccattcgtatatgggccagggcgatgagcattaccacgatatcccggcggtggtgctggcgcatatccgcgagggtaaacctggctttgactcagtgatctgcggcaacgatcgcatcgcgtttatggtctatcagacgctgctgggccaggggttacgcattccacaggacgtggcggtagtgggatacgacaacatggtgggcattggcgatctgtttctaccgccgctctccacagtgcaactgccgcattatgacatcgggcgcctgagcgccctgcatatcattcacggcgacaaccatcgggagacgcgcaaagtcgccagcccgtggttgccgcgcgcctcacattaacgattaccgatgttgcgcagcttctcgcccgccatcaggttgcgctcaatgtgctcgagggtgacattcttggtttccgggatcagccagaaggtgatgccgataaaggccacgttgagcgccgtgtagagccagaaggtgccggcggcgccaatcgcgtcaagcagcgtcaggaaagtggcgccgatgatcatgttcgacacccagttggtggtggtcgagcaggtgataccgaagtcgcggcattttagcggctggatctcggagcagaggatccacactaccggcgccgcgctcatcgcatacccggcaatacacatcatggtcatgccgacggagagccaggagaggccgctggatgcggtgccattgtcgaactgcatcaggcagtagcccagcaccagagtgcccagcgccatcacgctaaagccgattttcagcgctggcttgcggcccgctttatccactgtgaacaccgcaataaaggtggcaaacataaaggtcaggcccaccaccagggtggcgatcatctgctgttcagtagtggtaaagcccgccattttaaagatacgcggcgcatagtacatgatgatgttcatgccggtgaattgctgcatcgcctgcagcagcatgcccaggaacaccgcccggcgcacgttacgattgaccttaaacaacgcccaaccgccctgcttcagcttgaggctctcacggatctcgttaagctcgtcgcgcgccttttccgaggtatcgcgcagcatccgcagcacttcttccgcttcgatatggcgtcccttctccgccagccagcgcgggctgttcggcaaaaagacgaccagaatgatcaggatcaccgccggcagcgccagcacgcccagcatggcgcgccagttaccgctgtagctaaaggcggtatcggaaagaaacgccagcacaatgccaagggtgaccatcagctgatacatactgatcattttcccgcgcacgttctcgctggccatctcggagaggtacagcggcgcggtataagaggcaatcccgactgccacgcccaacaccacgcgggccaccagcagcacctccacgctggcggcaaaagcggatccgatagagccggccacaaagagtacggcccccgccatcaggctgtatttacgaccaaggcggaacgacagccagccgttaaacagcgcgcctatcgccgcccccaacatcatgctgctaaccacccactcctgaagctggctggataaggtgaaatggtcggttataaagggcaacgctccggatatcacgccgatatccaggccaaagagcaagcccgccaccgccgcggcgatggaaacaaaccagttcatccgccgggtatcacgttgcgtccgcggcgataatgtagagtcgttactgattgaagtcatttttttcctgccacacagagtaagacataagacgaaagtacgtgactggtggatgaatgggtcaggcaggataagccaaagatatggactatattgctggcaggatgggttttgtgatggacattaaactttcaaagtaacaaaaaatgcgtttccaatagttaataaccctgtttatacagagcggtaacattatacccgtgttcaggagtatggacgatccgcacttttgcgtatggacaataattgctcagaaggccggagcgataccacagaccccggccatcgcggacggttagcgcgccagccagccgccgtccaccgccaccgtgtagccattgatgtaatcggaggctgaggaggcaaggaacacgactggccccatcagatcggccggtagcccccagcgcccggcgggaatgcgatcgaggatttcgctgctacgctgctcgtcggcgcgcagctgctgggtgttgttggtcgccatataccccggggcgatggcgttgacgttgatgttgtgtttggcccactcgttggccagcaggcgggtgacgcccatcaccgcgcttttggatgcggtatacgacggcacgcggatccccccctggaacgacagcatggaggcgatgttaatgatcttcccgccgctgccctgggcgataaagtgtttcgccgccgcctgggacataaaaaatacgctcttgatgttgaggttcatcacgtcgtcccagtctttttcgctgaacgccagcgcgtcctcgcggcgaatcaggccggcattgttgaccagaatatcaatatggccgaactccgccaccgcccgctccagaagctgaggaataccgtcgatctggcgcaggtcggcggtcaggctaagaaaacggcgtcccagcgcggttactcgctcgatagtctccaccggttcgacgatattgataccgacaatatcgcagcccgcttccgccagcccgagggccatcccctgacctaaaccggtatcgcatccgctcacgacggccacttttccctgcagggagaatgcatcaagaatcatattatgttccttagtcgttcagagcctgctgtttgcaggcaaggttctctcggcccggtccgcgccggcggcgcgactgagcgtggggcgaactctcgggcatagcccaccataatgaaaataaaacagagttccgttttgctgatgggtgccatcttagccccgcccccagccattttcaatattatttaaaacgatgtttcattttttatgatgatgattacaaaaaaagaaaaagcgaaggagcctcccggcacgcgccaggccggaaaaggttttgaaaagatgaagattcaaccgattgtctgcagaggtgccgaagcgaagccagcagcccgctgaaaacgcgggaattacgctgaactgcgtgagccatcacaaataatgaaacaatgttttgataaattaatacccgtcttttaaaacatatcactcagcgacacgcctctggtccagcggcatcgcaggaaagaaaggagcactacatggctaaaggcatgcgggtcaaactgaattatcacgtcagccacgatccggataccggggcggaagtcacccgcttaacccccccggaggtcacctgtcatcgcaactacttctatcagaagtgcttttttaacgatggcagccatttactgttcgccggcgagtttgacggccactggaactactatctgctgaatatcgccagcgccgaggccgtccagctaaccgaaggcgccggggataacaccttcggcggcttcctctccccggacgataagtcgctttattacgtgaaaaatgaccgtatcctgctggaagtcaacctgaccaccctcgccgagcgcgaagtttatcgcgttagcgatgactgggtagggtatggcacctgggtggcaaacagcgattgcagcaaactggtgggcattgagattgccaaaagcgactggacgccactcaacgactggcagattttccatgatttcttccataaaggaccgcactgccgcctgctgcgcgtcgacctgcgcagcggtgagagccaggtgatccatgaggaaaaaatctggctgggacacccgatctatcgtcccttcgacgaccataccgtcgccttctgccatgaagggccgcacgatctggtggacgcccgcatgtggctggtcaacgaggatggcagccatgttcgcaaagtcaaagcgcatgctccaggcgaaagctgtactcatgaattttgggtgccggacggttcggcgctgatctacgtctcctatctgaaaggccagcagggacggacgatctatcgctttgatcccgaaagcggcgtcaacgaggccctgatgacgatgccggcctgctcgcatctgatgagcaatttcgatggcacgctgctggtaggcgatggctcaggtacaccggtggatgtcaaggataccggcggctactccattgataacgatccctggctgtatgtctttaacgtggcggaaaagcgctacttccgcgtcgcgcgccatgatacctcgtgggcgacggtggccaacagccgccaggtaacgcacccgcacccctcatttaccccggacgatagcgccattctgttcagctccgataaagacggtaaaccggccatctatatcgcgaaattacccgcgcacccgtcaatgctgagcgcctgatccacgccacacttctttctgtaactggccttgccctccttcatggagggctttttttgtcccttctctttcccccataaaaaaaccccggctgacggcgccggggaaaacaaacgatgagggatgaatggtcggtcagaacgagtaagccaccccaacgcggaagcgggtctggcgatcgctgcggtcattgaccccgacgttgccaatttcgccatacggcgaccagttattatccagcttataggccaccttcacgttatattcctgcgagtagggtttattgtcgttgcggctgaccccttccgagctgcgggcatagacatagttcagctctgtacgccagtcgccgaggacaaatccggcccacgcgtcgccgcggttaactttgtcatcatctttgccggcgttgttcggatagcgggtgtattcatagcgatagcgagcggcgacatagaagccgttgtcgaagctgtactgcgcgtgcaggtgcggcttgtagatggagcggctgtcgttgctctcaatggtaaacccgggggtgaggaaaaagttcgacgttgctttccagcgccagctgatggtgtcttcatgaccattgcccaccacgtccgaatagggttgcgaaccgttgtcgccacccgaacgccatttggcctcgacggtaaagcctaagccgttggcaaagcggtgagaaacggagacgcggtcagcattacttttatcactctttccgccatcaataaattcatgacgtaaatctatcgttaccgcggttgccgcaaaagacataccgcagagggcggcgagaaccagagatcgttttaacatagggtacccttacaataaataaaatgacatttcgtttttatgaaacatcattttattttttagacaccatagttttagtgaccaggatcgtagttatttgtttcaaaaaaggtggcacaacaagacgtgacgaagctcaataatttcgccggggagagtgaaagagggaggggaaaaataagggttcggcaaagcacggcgcataaaaaaggcctcccgcaggaggccatggaaatcgaggtatagcgctatgcgcgttctaccgccagcgccacgccctgaccgccgccaatgcacagcgtcgccagacctttgcgggcatcgcgcttgatcatttcatgcaccagcgacaccagaatccggcagccggaggcgccgatggggtggccgagggcgatcgcgccgccgttgacgttgacccggcgctcatcccactccagtacccggccaaccgagatcgcctgagcggcaaaggcctcattggcttcgatcagatcgacgtcgtccagccgccagccggcccgctccagacagcgacgggtggcatgcaccggggcaatgcccatcagcgccggatcgacgccgacgctggcgaaggcgcggatccgcgcaaggatcggcagccccagctccagcgctttagcctcgctcatcatcattaccgccgccgcgccgtcattgatgcttgaggcgttgccggcggttaccgatccaaggcgatcgaaggtgggctgcaggctggccagcccttccgcgctggcatccacccgcggttgttcatcggtatccacggtgcgcgccgcgccgttatgctcggtgacaaccgggacgatctcatcgcgaaagcgaccggaatcaatcgccttgcgcgccttatgctgtgagctgagcgcccaggcgtcctgcagctcgcgactgatgccaaattcccgggccaggttttccgccgtgacgcccatatgataatcgttgaaagcatcccacagcccatcatgcaccagactgtcaatcagctggctgttgcccagctgggcgccggtgcggctgtcggtaagcacatgcggagcgcggctcatattctcctggccgccagcgatcaccacgtccgcttccccgcactggatcgcctgggtagcgaggtgcagagccttcaggccggaaccgcagacatcgttaatggtgatagccgatacggtgttaggcagcccaccgcgaatagcggactgacgcgccggattttgtccggtccccgcggtcagcacctggccgaggatcacctcatccacgctgtgcggatcgattcccgttttctccaccagcgccttcaccaccacgctccccagctcgacggctgaatggcgcgataatgcgccctgaaagcagccaatcggcgttcgcagcgcgccgacgatcacgacatccttcatcctctacccctgcccatgcatttgcgcaaagaaacagcgatatactagataattgttatcaaaaaactttgtaattgtttaaaaaaagtgaagccaatcacaaagaaatagctattcgttaacgttcacgccgctgcagatgctgacgcagccagctgccggccgctcccggcggcgctttcttattccacagcagatcgactgaaattgcccgcggccagccggggatatcgagcgccaccagcccgccctgcggcgcaaactccgccaccagcgcgctgggcagaatgcaccagccgaacccctgcgccgccatgctgagcagcagcaggtagtttggcgccgaccagacctggcctgcggcaggttcggtggcgctggccagaaaggtgctcaaacgcagctcgcgccagctgcgcagctcatcccaggcgaccttaccctgcgccgccagcggatggccaggggctacataaatgcccatcgccgtctgcagcggcaggcgggtgctgccgatatcggtggggtagcgctccctcgcctcaatcagccccacctgggcgcgggatttttgcaggagatcgatcacatcctcgtcttcgccaatcaaacactcaaactcggtatgaggaaagcggcggtcaaactgcaccagcagatcttccagcacgtccgggtgcagagtatcggagagcacgaaggtcagccgcggctccgtctcgccggacagcgacacagccagttcgtccagccgctcgctggcggcaagaatcgctttgacatagctcagcacctgctccccctgcggggtcagcgtcggttgccgcgttgccctgtcaaagaggattacgccgagatcggcctccagattggcgatggcggtactgatcgtcgactgacttttccgcaggcggcgggcggcggcggagaacgatccgctgtcgaccgcctcgacaaaggcggttaaggcttccggtgaataacgcatgatgtatctacaatatcgatggttcctatcttttgtttatcatatttttccataaactgccgggtaatttcctgttcaggctaaaactggaggtagctcgccatgcaacagaccccacatcagcgcaagacgctcaccgaacgcgttatccacgccatcaccttcgaaggactggcgacgctgatcctcgcccctaccgccgcctggctgatgcagcgctcggtagtggagatgggcggactgagcattctgctcgccaccctggcgatggtatggaacattatctataacgcggcgttcgatcgcctgtggccggtctcccgcttcccccgccagctgaaagtacgcgccctgcacgcgctcggtttcgaaaccggattcgtcatcattggcgtcaccatggtggcgatcgtgctgggcgtctcgctgctgcaggcgtttatgctggagatcggttttatgcttttcttcctgccctacaccatggcctttaactgggtatgggacaccctgcgcgagcgcgttattcgtcaccgccgcccgcgccagacggcgcgcggttaatcccggcgcggatcttcgacgatccgccgcgactttatcaccgaaaactatcgcaacagacgaaccataaatatggtaaattgcactccttttttttggtttgacggttgataaagtcgcataatgtctaaaatttggtctaaagaagaaactctatggagttttgccttatatggcactgcagtaggcgctgggacgctatttctaccgatccagctgggttcggctggcgcgattgtgctgttcatcaccgcgctggtcgcctggccgctcacttactggccccacaaagcgctgagccagtttattctctcggccaatatcgcgccgggaaccgggatcaccggcgcagttaatcactactatggtaagaaaattggcaacctgatcaccggcctctatttccttgccttctttgtggtggtgctcatctacgccgtggccatcaccaactcgctggccgaacaggtggcgcatcgcacgccgatgaccccagggctgcgtgcgctgctgagtctgggggtcgtgctggtcctcaacctgatctttctcatgggacggcaggtcaccatcaaggtgatgggctttctggtcttcccgcttatcgcctgtttcctgtttctctccctctatttaatccgcgactggcatccggagcatctcaccagccagatgcagttcagcccgcagacgctccaccaggtctggatctctattcccgtgatggttttcgcttttagccatacgccgatcatctcgacttttgctatcgatcagcaggagaaacacggcgacctggccatgggtaaatgcaaaaaaatcatgaaggtggcctacaccatcatctgcgccagcgtgctgttttttgtcttcagttgtctgctggcgatcccggcaacctatatagagaccgcccgcgatcagggggtgactatcctctccgccctgtcgatggtgccaggcgcgccgggatggctggcggtgaccggcatcatcgtcgccgtcgtcgctatgtcgaagtcgtttctcggaacctacttcggagtgattgagggcgccagcgaaatcgtcaaaagctcgctgggcctgctgggcgtgcgtaagagccgcgctttcaaccgcgcgatgtcgatcctgctggtctccgccttcacttttgcggtgtgctttatcaacccgaatgcgatctcaatgatctacgctatcagcggaccgcttatcgccatgatcctgtttattatgcccacgctgtcgacatggctcattccggcgctgaagccgtaccgctcggtgggtaacgccattacgctggtggttggcctgctctgcgtgtcggtgatgttcttcggctaatcccctctggcgacagcggctgcctgagctgctgtcgcacattctgacaatattctcccccttgccttccttgtgagcggattacacttacggcttagccaccgtgaggagagttcttatgtccagtgtcaccttatccggtcgcggcacgctcggcgatcgccaggtctatcgcttaggttacggcgcgatgcagctggccggccccggtgtcttcggcccgcccaaagatcctgaagaagcggtgcgcgtactacaggccgccgtcgaggccgggataaaccatatcgatacctctgatttctacggtccacatgtcaccaatcagttgatccgcaaagcgctccacccctaccctgacgatctgtgcattgtcaccaaggtcagcgcccgccgtgacgagaaaggcaactggctaccggccatgtcgcccgccgaactgacccaggccgttgaagacaatttgcgtcacctggggcttgaggtactggaagtggttaatctgcgcagtatgctgagcccgcacggcccggtggagggttcgctggaggcgccactcgccaccctgctggaactgaaagagcgaggattaatccgccatatcggcctcagcaacgtgacggcaaagcaggtcgcggatgcgcagaaaatgacgcccatcgtctgcgtgcaaaatctttataacgttgcccatcgcgccgacgacgcgctggtggatgcgctggccgcccagcacatcgcctgggtgccctttttcccgctgggcggttttacgccgttgcaggcgcaggagttgaacgaggtcgcggcttcgcttgaggcgacgccgatgcaggtcgccctcgcctggctgctccagcgagcgccaaatattctgctgatccccggcacctcctcccgcacgcacctcgcggaaaatattgccgctgccgagctggtcctgcccgcggaagcgctgcgcaccctcgataatatcgccaccgccgcgcgccgctgacctgccagacaaaatggagggaaccctatccctcctcaatatttgcctggaaaaacctcaccgctactggcactatagatcctacaaatggggcgtgatcgacgatcgttctctcattatccccgttaattaaacttaagtttttatccttcgaccggtctccagcttggaggccgttgtcgtttttgtcatgaccaaaattcgaaactcttgattacaggaaatacaatatcaaattccaagtttatacatatcaatctggctgcaaagatagtcaataacatcaaacgctcataaaaacatctgattaacccaatcagaatgttgctattgctataagaaaaatcaaacgcctcacgacaactatttacaagggatgcatatgacagagggaacgataaagaccagtaagtatgaaattattgctattttcagagaggagttgcgcaaacgtactgaaattgaaatattttttaacaacaccagtatcataacccaactgacgcgcgtggactttgccgagtttcatattcagacccatcgcaaaatcccgtccgggcataaaattcgctttctcctgcatagcgattcagggaaaatagagtttaatgcggccctgacaaaacatgacaatagcggtgtcgataaaggtatccgctacgctttttcattgcctgaatgcctgcaggtagtgcagcgtcgccgcgatccccgctttcgtttacgccatgagcatgacttttattgccgcggccgccataaaaacggcgaaaactatcttttcgatatcaaagacatttcagatggcggttgcgcattgatgaccaaaacgccgaatcttaaattcctcagccacaacgccttactgaaaaacgccgtactgatgcttgcagaatatggcgagatcaccatcgacctggtggtcaaaaatgtcattgttatcaccctggataacgctaatgaagagagtgagagctactatcagatatcctgccagtttaagttccgccatctcgatgaccagcgcagaatagagaagatactgctggacctgatcttagaagccaagcgcaaaaagagaatctgacaaccttggacagtatattgctgtacaccaatgacaatctcattggtcactcaatctatcactaccttattgatagccatgaaaatgccacccgactgagttatgccgatgtcatccatgagaaacatctgccactggcccagacgattattttcaatttaattaataaggatatttctgccatcagaatcgtcgatctgctgaatgcgctccgcctttccctgctgcgctgccagcagccggtgctaatggtgaaaagcgacattgtcgggctgtgcagagagttgataaactttgacaacgctatgattattagtgagaaatctccgctaactcttttttcatctatcgtccagcgcgccaaaggcgtcagcgaactgccgccgcgaggattgcgcaaacagctttcaccacgggagtgtcagatcctcgaactgctcattgccaacaataataataagcgtattgccgccctgctcggcattgctcataaaacggttcatagccaccgcatccatatcatgcaaaaactgggtattgataactcccgcactatgaatcagcgtattgccgctctccatcaatgctaaatgttctcccggtaaatcagtagcggataaagcgtacttattcgctgttgatttacatttcccgccattcccattaatcatcaggtagcctataattaatgtatcctctgcctattgtctgactaacctcgtgaagagggataatgaacactaaaatattcgaagacaacattttatctcgtaatgatatcgctgtacgctacgtctttcagaaaatgttttccccacaaggtactctggtcgcggtggaatgcttaagccgctttgataatctttctatttcccccgaagattttttccgccatgctaccgccgccgttcgtgaacgtattttcctcgaacaactggcactgattgaaaagcataaagcctggtttttacgtaaccatatttccgcaacaattaacgttgatgaccatatcctgaacctgttgcgccagaaggatataaaagccaaagtcgccgccctgacctgcgtccatttcgaggtaaccgaaaacgccgagaatctgctgcataattctcttgccgcctggcagagcccacaggatacctcactgtggctcgacgacttcggctccggctacgcgggaattaacgctattcgcggttatcactttgactatgtgaaaattgataaggattttttctggcacctgatgcgcaaagagtccggccgccagctgatggatgcgctggtgacctttttatcgcgcaaccatcataatgtgattattgaaggtgtcgaaagcgaagcccataaagaatggctgcagggaatggagtggtttgctatccagggacattactggcgggaagtcagtattgaacaactggtcgccgatgatattgccatgtaaaaaaagccgggaattcccggctttttaacgtcacttaattataaactaattcccacgttgcccagctggtaatcggcccgctggtggcgcttttcggcgttggcgaaacatagccaacgtaataggtgaacaggccgccgctgaccgcgctttcctgcaaacgcacctgattttgctgcgggtccgccgggacaattttattactcttatccagagtattattatcgttagtcgatagggccagataaatattctgcgctccatccggcaaggtattggccagatacccggcgttttcgttaccgaccgccgtcagtaaaaaaccatcgacccagcgcacgctgacccgacgcacctcatcctgcgaggctgccccaccatcatggcgcagctggcagtttgacagtgccagggtaaacggctgcggtttcataaacgccccggccccgcgatcgtggacttccgccaggctgaccggcgccagccagacattaccgctgccggcatgctggccgccgtttagcgcgacgctacaggaaatatccgtcacccgcccggcaaaatcgacccgtccgcgatcgtaattggtctcaaaaccccacgccgagggggcggcgaggctgccgcaaaatagcagccacgcgatagtgtttttcggcaatcccttcattccccctcccgtattaatcgtacgtcaggttaaagatcatatgcgactccacctcgccggtgctggtcgtcgggccatactgataaaaacgcgcgtgcagcggtatggtgatgtagcgggtctcctgattattcaagcggccgacggtgtatttcttattaaactgcagcggggagccatccttcagcacctggatgccaatgcctttcgccatcccgctgccggctttttcattcagcaaggcgcccatggtagcggtagtgctggtggccagggtaccggagaacgaggtgctaatgttggcatatcccgtttcactcaggccgccgctgcactgcaggtcgatattaaaatccttcccgccggcggtggtgccgacccctttcaggtcggtgcgccggatggaacccacatcgacattcatatttttcccgctcagcaccgaacaggagggcgagaccacggtgatggcgttggcgctcagataggtttcgaggatcgggttaccgccgctctcccagtcgtaggaggtgtacttacccgccgccagggtgccgctgccggtggttgccgcggttttgataatctgcagcgtaaagcgcgacccttcgagggaatagttggtggtgttatatacccgggacgaaaagacgtcgggatagacgatatttaccgttgcgccgccgcggctgaaacgcatgccgattcccggcacgttggtggagtagattttatttccaaggtccgtggcccctggcgacacgatcttcgccgcaaagcggttggtgccggaagtacagcgatagcttgccccgccgggagcgctcatcgtccagtcgcgggtaaggatcaccgagcccaccggcagatccgggggcaccaccaccctgcccaccaccatgtccagcatcaccgttggcgatgagagacgcgtacaggaggcccaggacgaggtggttcccagcgccattaagacgataaaaagcgttagtaatttcctcagcgacatacgctatcctttgttgtttgctgtcccagatccaccgaacactgcccgccgctccacttcacaatcgcgcgtttggcgttcgcatcgctgataaacatcatgctgccctggccgacaacgccgatctccttgccgtcgggggagaaaatacttgccgcaaacggcaacggctcgtggttcgcctggcgcgcctgcagggtgaggttgttctgcaccttagtgccgaacgcgaccttaaccacgctgccttcccacggcacaacctgcgccacggtgcgatcgaaggccacgtcgtcatggctgcctttcgggtcgatttccacggcgttaatccggtacgggcgcagatacggcaggatggcgtaaccattgctgtccacacgggtgcccggcgatcccggaagcatcgccccggccgcgtctttggcttcaatcagggccatcgtcgagccgctttccggtgagagcaccacgccgccgctgtgggcgatcatcgtcccgctggcgccaatgccgctctgacgatagccttcgccctggctgtagctgccgttgagggtggtccatggcgtacggtagctgccgttgagcgccacatcatgctgaccgccggtggcggtggtggtcgacacgccgtagttaaggttgttttcactgtccagcgaaccgttgataccaatctgcgagctggcaaagcgcgagttattgaacgaggtgttcgacgtcaggttggcggtgcggttatcgccaaaccacagcgggtagctgaagttgagtgaaatacgatcgtcgcgacgatgaccggagctgtctggcgtatagacgcgctgcgcgctcgccgaccaggagagacgaccaaatgaattgttgtagctgacctgatactgcttctcggtcccggagcggttccagtaatcggagatacggccgctgagataaaacccgccccagccgtccggcaggttctggttcaccgtgaaggtcatgccgtttttttgccgccacagggtgtagttgctgcgactatttttttcctgatcgacggcgtacagcgcgtcgttgaggttgtaataacctttcgtcgagtagcgatacgccgccaacacgatgctggtctgggtatcggtaaacatgcggttaaaggtcgcgcgatagctctgacccgagtcatcatgggcatcgctcttcaaccgcgaatgggtgacgtcaaaagagagcgcgccgatgccggtgttcatcccggtccccaccaggaaggcctgatagtcgtcaaaaccggtgaccccggtgtagccggtcaacaggttgttgatcccgtgctgccaggtcgcctgatagagcatcggcttgttgcgcagcgcgctgtcgtccactttaccggcggagagcgcgtagcgggtcatgcccgggcgcagcagctgggcgacggaggcgtaaggcacgctaaacacttctaccgagccatccgcttctttcaccgagacctcaagatcgctgccatagccggaaggatagacatcctgcagggtaaacggtccgggcggaacggtggtctgatagataatattgctgccctggcgcacggtgacgagggcgttgctctgcgccacgccgcgaatttccggagcatacgagcgcatgccgtccgggaacatattgtcatcggtggaaagattaaccccgcgcagaccgatggtgtcgaaaaattcaccattggtgaaaatctgcccgccgctgacgatggagttgagctgtgggatagggcgctggagataggtctggttgctgttccagtgcgctttaccctgctgctgctgccagttcaggttgccgatgtgcttcagcagccagccgtcccacgacagtccggcgttgacgcccagataggcgctgctgttatccgacccgcctaccgaagaggtatggctgttccaggcgttcgccatccagccaagattgagcgcggtaatacctttgtcccagaactccgggctgacatagtttttcaggcgttgatcttcatagatctgcggtaccgaaatgttcaaccgcagggaggactggaccaggttgtctttgacgttttcttcgttgcgccaggatttgaggctaccgcagtagccctcctgctcgctcagctgcggattgagcttttccgccgcgatgccatattgggccagcatcgctttggtgtagcagacgcccagccgaccatctttatcgcgcgcgatgcgtaaatcgtagcgccctttccactcgtcgttggtgtagacgtcaagggagtaagtgccttcggtaatcgcgctggtcgaaaagcgcgacagatcgaccttttcgcgactgccgacaataaagccgtcgttaaactgatataccgttcccgggttttcctgtccgctggaaaatggcggaaagcagcacagcgcgatggcgatcgcggtgcttaatcttcccgggcagaatgacctctgcttcattagcttttcccttatttaacggccactttcactgcgacatcggcgccatagtcattaatgttgttaacggtcagggtttcgccgcggttgacggcggaggagagcgccaccgtctggctggactgcggcgccagcatcacggttttgctgttcagggctttaccgccgtcgcgggaaatacggctgacggtaatgtagaacggcgtcgggttgttgatggcgagactactgccgctggcggtcagggtcagcttctcggccgccgcatcgcggttgcccagtccggcaggacgataaataaatttaaagcgcgaacggatcgccagctgcagcacgttctggccttcatttttctgattggccaccaccggcggaatttccagcagattcagccaccacagcgtctctttatctttcgccagaccggcgctgctgccgagcttaatacgcagcgtctggccgctcttggcgtcaacgcgcgaaatcggcggggtgataataaacggggtggtaatggtatccggtgtggcatcggcatcgccgttatccagccaggcctgcgccagcgccggacggtcggcgttatttgaaagctgtaccgttatttctttttcatttcctggataaataaagcgggtaccgttaacaataatattgttggcatgggccgcaaaactaaaaatgaaacagaaaaaaagggcaatacgcttcatgctgacctcagaataaaaatacaagcggcggacattgccgctttattattgttattaactgccccatcgcggggcagttttattttctgacggaattactggtaagtaatttcgtaagtcgcgtagctgttaaccacaccggtggttaccgtggtcggcgcgctggtggcgtagcctacgtagtaggtgaaacgcgcgccatcagctacagcggaagcgtcgcctttcgctttcggctgagtgctgtcacccgggatgattttgttggtcagcgcggtagcgttgtcagtagacagcaccagctggatgttctgagcaccggaagcttcggtgttcgccaggtagccctgttgtttgctggttgcgccagccagcaggttaccgccggtccagttcacgcccagtttgcttacgtcatcctgtttagtgccatcagcagcctggcagttagagacgtcaatggtgaaagatttcggtttcaggtaagtatccgctgctgccgctttaacttcagtcagggttaccggagacaggtaaacgttcgcatcgctgccctggccgttaacggaaacagtacaggatacatcggtaactttaccgaagaaattaacctggccgccgccaacagtggtatcagctgcatgggcagcagtcatgccaaaaaacgcggttgccattgctgcagagagaagaacctttttcattgccatttccttgtcagagtgaattacgaatcaatgagcacactgtgaattcgcatagaaccagaaacatcaggcgatgctgatttatgccactgctaaggaaggtgcgaacaagttcctgatatgagatcatcatattcatccggagcgcatcccagagggacatcatgagccatcaactcaccttcgccgatagtgaattcagcactaagcgccgtcagacccgaaaagagattttcctctcccgcatggagcagattctgccatggcaaaacatggtggaagtcatcgagccgttttatcccaaggcgggcaatggccgacggccctatccgctggagaccatgctgcgtattcactgcatgcagcattggtacaacctgagcgacggtgccatggaagatgccctgtacgaaatcgcctccatgcgcctgtttgcccgattatccctggatagcgccctgccggatcgcaccaccatcatgaatttccgccacctgctcgagcagcatcaactggcccgtcaattgttcaagaccatcaatcgctggctggccgaagcaggcgtcatgatgacccaaggcactttggtggatgccaccatcattgaggcacccagctctaccaagaacaaagagcagcaacgcgatccggagatgcatcagaccaagaaaggcaatcagtggcactttggcatgaaggcccacattggtgtcgatgccaagagtggcctgacccacagcctagtcaccaccgcggccaacgagcatgacctcaatcagctgggtaatctgcttcatggagaggagcaatttgtctcagccgatgccggctaccaaggagcgccacagcgcgaggagctggccgaggtggatgtggactggctgatcgccgagcgtcccggcaaggtaaaaaccttgaagcagcatccgcgcaagaacaaaacggccatcaacatcgaatacatgaaagccagcatccgtgccagggtggagcacccgtttcgcatcatcaagcggcagttcggcttcgtgaaagccagatacaaagggctgctgaaaaacgataaccaactggcgatgttattcaccctggccaacctgtttcgggtggaccaaatgatacgtcagtgggagagatctcagtaaaaaccggaaataacgccagaaatggtggaaaaaatagcctaaataggctgattcgatgtgtttgcgggaaaaaaatcggcccagatccgcgaaattttaatcagcgagtcagcttgggaagaaatgacctgcttattcgcaccttccctaatagaatcttcgactgaccgggagccgcaatatttaaggcgtcaggtaacgaacctaaaaatataagttcgctggtgctatcggcgtcaaagaatgctatttattcgccgacaaatatacatttgttcacgtttcattaagttatataacagataaccatcgactattaataaacagccattgatagatgaaaacgcgagggtggttgtttacagcgcagcaagcctaacgccagagcgagagaaagtgaccgcaacagcatgcagaaaaagccctcggaaggccatcgcgataagtctgaatctgcctttgcggtggtgaaaacagcaccaaaccattcacacaacgaatggtgaaagcatgaatgaggcgcattcctctccctgaacaagggcagcccatgtgatcccccctttcagaaacaaatcattaatccattgtttttaaactaaaaaatagataaacgatcatgtttacgccatcaaaccgccataaaaatgtgatctaaatcgcactttttgccacgcgcgttatagttagcaggcttattataagtccatcgaaagcaaacatgctttccaccataaaagttaaaaggacaaacaccatgaaaaacgtaaaattactcgccgctgccggtatgctctccctggtctctttcgctagcttcgctcatccggtgagcgtgacagcagacaccctggacagcgcagaagcgaaaatcgcaaccattgcgaaagaacaaggcgcttcctatcacattaccgaagcgtacaccggcaaccaggtccatatgaccgccgagctgtctaaataagcgaatggttgcagagggagctgccggacaggccgcctgcgggtggctggtctggctcccgccgcccaccccgcacgcagcaatgtcgagccccgttacggggcttttttcgtttttgctcccgccgcctgacgcgccagcgcgcgctggatagacagcacgctcgccagcaccacgatcaatcccatcagcgccatcccctggatcttttgtccgaggaatatccatcccagtaccacggcggtcaccgggctcagcagactcatcgccgacacggccaccggtgagaggcggccaatcccccgaaaccacaggccataggccagcatggcgcccgccaggcacagccacagatagccggccgcctgcagcactgttacctgatgcaaaggagggtcaacgatcagcgccaccggggccagcaccaccccaccgatcgtcagctgccagccggtcagcgcgacgatcggcagggagagcgcccagcgccgggagagccaggtgcccagcgccatactgatcgccccgagaaacgccgcgccgatgcccagcgggtcgagtacggtgtgcggcgacagcagcagcatggccataccgagtatgccggcgatggcggagaacaccgccagccagggcgagcgctgccggtcgacacaccaggcgaggagcatcaccagcagcggctggatcgcgccgatcaccgccgccagcccgccgggtaagcgataggcggcgataaacaacagcgcctgaaacgcgccgatatttaagatgccggtaacgatcagctttgcccattcgccgcgttgcggaaaacgacggctccagatcagcagggcgatacctgccggcagcaccctcagcagcgcagcaataaatgggcggtcagggggaagaaactgggaggtgacgatgtaggtcgtcccccagatagcgggcgccagcgcggtgagcagcaggtcgagaatcagattacgtgagagaaaagccatgattttatcttcacttcaaggtaaattagtgagtgaagtatgtaccgccaagtatcttgatatcaagacaagtgagcactaatggacaaatcaccgccgatcgacgccgtggatcgcatcctcgcccagtggcagcgggagcggccagacctcgactgcagccccatggggccgataggtcgcctgaaacgatgcgctatgctgctggagccgcaggtggaagtggcctttacgcgccacgatctggtgcgctgggagtttgacatgctggcgacgctgcggcgcgccggagcgcctttcgtactttcgcccacccagctcttctccacgctgatgattacctccggcaccatgacccatcgtctgaaggcgctggagaaacgcgggtttattacccgcctgcccaatccggaggatgcccgcagtatgctggtcgccctgacttccgccggacgcgaacggatcgatgccgcagtggaaacccacgtcgacaacgaacggcaactgctggcaggactcagtgacggtgaacgccagcagttggatcaggcgctgcgggtgttgatgcgactgctggaaacgggctaacagccagcggcgataaagtcgccgttggcgctgatcggcaccacgctgaaaaacaatcccacggcaaagaggatcagcgccagaccgccgaggatcttcaccaacggtaccagccagggccgcgggcggtgattcgtggccaatcgtttgaccgtccgatggcgcgcatagtgaaccagtagcgacagaccgaggatcgagagcgcggtgcccagcgccatgctcatcaccgcggcgatgccccagctaacaatccccaacgcattggcgaataataaaatcatgatcgccccgctacagggccgaacgccgatagccagcaccacgccaaggcgcgtcttccagtcagcgccctgcagatcctgccccacgccgtgatggccgcagccgcacgaggcgtcatgctgatgcgctggcgtcagacggcgaatcacctgttttgtcggccacaggctttgcagagcgcgaaagataacataagccccaaagacgccgatggtcagggcgctgatcttctcgacgtaccagcggctggcgctaagatagccggcggccagattcagccccaccgcaagaataaagacgaagagtatcgcagtgacgccctgtaacaggctgccgagaaagggcaccacccgcgccgccgtcaggctctcctgattggtgctcaggtaggtcgtcacgataaatttaccgtgtcccggtccgacggcgtgcagcacgccatagagaaaggcccccaccagcagccagataccgccgctgtactgatggttattcagcaacagaaggtacatcaccagatagcgatgcagggtaatttgggtggcgagacaccactggagaaagtcaccccagtggctgtgcaaggtgatagcggcggccagcagtagaaggccgccgcacccggccgccagcaggcgccagtcgcggagcgcaatcggagtcgtcatcgttataccattgtagtaaacgtaaaccgcctgacagcaactttacgacaggcgagcgaaggcgtcagcgctgaagggtgaggaatttgtcgaagctgttcacgggattgttcgtagtcaccaggctccgcattatctaccgatcgctatcttcccgacaccgtattagcgcagaatgcctcaatatcttgagcataccacagctatatctttttatgcgttattggttaccaataccttttaacaggaataattactcaaaaaatcacagataaaaataaataacttatttcttggcgagcattttttgtcagttattatgctgcgcttccggcaagaatattctttaactgctatttattgtactcttcagcaggatcacttccatgaaaagaggcttacttaccctggttactgctgccatcgctttccgtacaggccacctggcgcagcgacaagcgccaggtggcacgtgacgaaaagtggtgaaccggcaggcttcggcgtatcctggatgtgagtccttcccgcgccgaagcgagtattccaacccgccgccagaccgtgtcgcaatacttacctgtcctctactacctcccattgatatcttcctgtatacgttgaccgtgacgagttttcatctcattcaaccgcatgtaccagattaagcttacccgttgaaatacggcgtaatgtgctctattacagacaatgctattatcaccaggctttttgcagtatggtttaatcactgttgtagttttgcagtgaatgctatccagacgacttaaggttgtattttgtctgagaaatttctcatgccattcccgaaggttgtcggcgagggaggctggtttacaggggtgacattgcccagtaaacaggcaatcaatcatgacggcattgatagccgccttgccgtggccggaagcccaagccttcatcatcatgcgggtatcatcaagaggatcagggatgtacaggacgtggaaacccccaggaaagattcatcagttcagccagctcaccctttctttacccttcagatcgcggcctcttatcgttagcaatggagctagcccatgataccgctcgcgctcgtagcaaattaaaacgttatcaccacgctgtttcaaaataaaaaggcagtcaaatttaacaatgacctgacgcaggctcggaaaaccaaaaatatgcctgcaataaaagggaaaaccatgacgaataacgccgacataaaaaaaaggaacttcctgactcagaatgaaattgagtctttacttaaagcggccgataccggtccttatgctgcacgtaattattgcctgacgttactgtgcttcatccatggtctgcgcgccagcgagatctgtcgtctacgaatatcggatatcgaccttgctgcccgatgtgtttacatccatcggcttaaaaaagggttttcgactacccacccgttgctggataaagagatctacgccctaaagcgctggctggccattcgcagcagctggccgcaggccgccagcgaatggctgtttctctcccgcaaaggtaatcccctttcccgccaacagttttatcagattatcgcgtcctcagggggactggcagggctgccactggagatccacccgcacatgctgcggcactcctgtggctttgcgttggcgaatatggggatcgatacccgcttgatacaggattatctcgggcatcgcaatatccgccacaccgtctggtataccgccagcaatgcgggacgcttctatggcatctgggacaatccccgtgacaaacagcgatcgtcgctgatccaatagccttgacgccacggatggcgttgtatcgcgatcggtcgacaaattaaaatattcatgattattaaccctgcgttaattaggattactgttcccacaagttcttatttaatccttattactgagagttaatataaccctgcgtttactcaggaataagactgggtatttattggtgggaaaaaatttccgcggctgtgtgtttaatagcggctggtaatgaaaaatatcctttcattttatatacctggcggcaacccgcgcagatactattgagccgatgattaaaatctttaaaattaagaattatcacccgacgatatttttagtgtctggcaatgtaatatgttatcaattcgtgattaatcatcttcaccctgtaccgttttagcattacagaacctttctcgtcatggcgtatggtttcgctgtgacggtcattcatacctattttcaggagcaactattgtgaaccgacgtcgttttctaaccgccaaagaagttcaggccatgatgcaggctgctcgtcagggccctaccggcgaacgggactactgcctcattctgctggcctttcgccatggtatgcgcattagcgaactgctggatctgcattatcacgatctggatctccatgaagggcgggttaatgtgcggcgattaaagaatggtttttcgacgattcatccactgcgttttgatgagcgcgaggcgattgagcgctggagcctggtccgtgccggctggaaagcggcggacaaaacggacgcactgtttatctcccgccgcggcaccgcgctctcccgccagcaggcgtatcgtattattcgctctgccggggaaaatgcgggtaccgtcacgcacactcacccccatatgctgcgtcacgcctgcggctatgaactggctgaaagagggacagatacgcgtttgatacaggattatctaggacatcgtaatattcgtcacacagtacgttacaccgccagtaatgcggcacgtttcgctggcatctgggaaagaaataatcttttagaggaaaaagaccagaagacgaaaaatgaaataacagattgattttaaagaattaaaaaaataacgaacaggtcaattggggccaaactgtttatatcataaaaatgttttgacatattttgcaactcactgcgccatatttccgcaaaaaaaatcatatctcattgattattatctatttttaaacctgcaattactcacttttctctaaccatatctctgctgcaccggcgatccgtcgccaacgccatcgctattcctttcgcaccccctcccaccacaccagattatattaccataaaaaccaaatttggcagcatttaaaaccacagaataccaggttgacacaaaatacagatcatttatcccaacgagtcaaaatggccccaattgtctcatcggttgggcgaaaactgtgcagagccggcagccggaccactcggctgaaatctgaaatgcctggaaggcacaacggctgccaatccggttcgttatttcgacatcgttcaaaggaaaacagtatgaaaatcaaaacactggcaatgattgttgtgtcagccctgtcactgagctccacggcagctctggccgataccaccacggtcaacggcgggaccgtgcattttaaaggagaagtcgttaatgcggcctgtgcggtggatgccggctctatcgatcaaaccgttcagttaggccaggtgcgttccgcgaaactggccacggcggggagcaccagttcggccgtcggtttcaacatccagctggatgattgcgacactacggtagccaccaaagcgtccgtcgccttcgccggtacggccatcgacagcagcaataccaccgttctggccctgcaaaactctgccgctggcagcgcaaccaacgtcggcgtgcagatcctcgacaataccggtacgccactggcactggacggcgccaccttcagtgctgcgaccacgctgaatgacggccccaacatcatcccgttccaggcacgttactacgcgaccggcgcagcgacggctggtatagcgaacgcggatgccacgttcaaagtgcagtacgagtaagacccgagtcaggcagggaagctattcgggccaggagggcccgctctctattttcaaccggagtgaaacgatgcagggaatgaaatctggtctgctgctgctactgcctccgctggcgctggccggtaatcattggaacgtcacgctgccggggggcagcatgcgttttcagggcctgataatggcgagctcctgccacgtcgaagccggcgatcggcagatgacggtcaatctggggcagatcagcagtaatcgatttcatgctgtcggcgaagacagcaacccaatccctttcgcgattcatttacaggattgcagtacggcggtcagccagcatgtgggtgtgacctttcacggcgtggctgatggaaaaaaccccgacgtgctgtcggtgggtgaaggtccggggatcgccagtgggatcggtattgcgctattcgacagccagggccagcagctcccgctcaatcgtccaacggatcgctggatatcactctaccgcggacggacgacgctaaatttcgtcgccaaatatcgggcgaccggacgccaggtcaccggcggtgcagccaatgcccaggcctggttctcattgacctatcagtaattaatccgcagacaaacaggacaacacggtgagcagacaaggagataatgtgagaaaaacggcaacgatggcgcatggcttactggcaggatgtgtgcttttcgccgccagtatctttagcgccagcgcgcaggcgggcgttgcgcttggcgcgacccgggttatctacccggcgggacagaagcaggtccagctcgcggtgaccaataatgatgacaacagtacctggcttattcagtcatgggtggaaaatgccgatggtcagcgagacggccggtttgtcatcactcctccgctgtttgccatgcagggtaaaaaagagaacaccctgcgcattatcgacgccaccaataaccagctgccgcaggatcgggaaagtctgttctggatgaacgtgaaggcgatcccttcgatggataaatcaaagctcagcgacaataccctgcagctggcgattatcagccgcatcaagctctactaccgtccgggaaaactggccctgcctccggatcaagcggcggaaaagctgacctttagccgtagcggatcgtcgctgacgctgacgaaccccaccccctattacctgacggtgaccgaactgaacgccgggacacgcattctggagaacgccctcgtaccgccgatgggcaaaaccagcgtcaagctacccgcggatgccgggaacaccatcacctatcgcacgattaatgattacggcgcgctgacgccgaaaatgaatggcgtgctgcgctaacccagaagcgccccgccgcgcgggacacgctgcgcatgaccagaagcaatgacagccgggcaacgtcggaccggagggataatgtcacatcggaaatatggactggatcatttaggttgccgaactgcccggcgcctggtatctccggcgctggcgctgtggctctgctcacagccgtttgccgcgcgggcggacctctattttaacccccgctttttagctgacgatccggcggcggtggctgacctgtcgggatttgaaaaaggccaggaggttccgccaggcacctatcgcgtcgatatttatctcaacaatggttttatgaccaccagggacgtcaccttccaggccgatgcccagggtcacggtctgtccccctgcctgacacgcggccagctggcgagcatgggtgtggataccggtcgggtgccgggcatggcgacgctggacagcacggcctgcgtgccgctgaccacgcttatcagcgaagctaccacgcgcttcgacgtcggacagcagcgcctgtacctcaccgtcccccaggcatttatgggtaaccatgcgcgcggctatattccgccggagctgtgggataacggtatcaccgccgggctgataaactataacttcacgggcaataacgcccataacaccacaggtggcagcagccgttacgcctatctgaatctacagagcggcctgaacattggcgcctggcgtctgcgcgataacagcacctggagctacagcagcggcggtagcacctcatccaacgagaatcgctggcagcacgttaacagctggcttgagcgggacatcacgcctctgcgttcgcgactcaccctaggggacagctacaccaacggcgatgtcttcgacgggatcaacttccgcggcgcccagctggcctccgacgacaatatgctaccggacagccagaaaggctttgcgccggtgatccacgggatcgcccgcggcacggcgcaggtgtcaatcaggcaaaacggctacgaaatctaccagagcacagtgccgccgggaccatttaccatcgacgatctctacgccgcgggcaatggcggcgatctgcaggtcacgatcaaagaagcggatggctcccgccaggtcttcagcgtgccctggtcaacggtgccggttctccagcgtgaaggccatacccgcttcgccctcaccgccggggagtaccgcagcggcaacagtcagcaggaaacgcccgattttttccagggcacggtcatgcatggcctgccggcaggctggacgctctacggcggcacccagctggcagaccgctatcgcgcctttaaccttggggtggggaaaaacatgggctatttcggcgccctgtcgctggatatcactcaggccaacgccaccctggctgacgacagcgaacatcaggggcagtcggtgcgttttctctataacaaatccctggatgagaccggcaccaacctgcagctggtgggctaccgctactctacccgcggctattataactttgccgataccacttaccgccggatgagcggctacagtgtggaaacccaggacggcgttatccaggtaaaaccgaaatttaccgactactacaatctggcttacagcaagcgcggcaaggtgcagctgagcgtgactcagcagttggggcgcaccgccaccctctatctcagcggtagccaccagacctactggggcaccgacgatgccgatgagcagctgcaggccggcctcaacgccgccgtggacgatatcaactggtcgctaagctacagcctgacaaaaaacgcctggcagcaggggcgcgatcaaatgctggcgatcaatatcaatatccccttcagccactggctgcgttccgacagccgctcggtctggcggcacgccagcgccagctacagcctgtcgcacgatctcaatggccgcatgaccaatctggcgggcctgtacggcaccctgctggaagacaacaacctcagctatagcatgcagaccggctatgccggcggcggcaacggcgacaacgggagcacaggctacaccgccctcaactaccgcggcggctacggcaacgccaacgtcggctacagccgcagcgatggctttaaacagctctattacggggtcagcggcggcgtgctggcgcacgccaacggcatcaccctgagccaaccgttaaacgataccgtggtgctggtgaaagcccccggcgccggcggcgtgaaagtggaaaaccagaccggggtacgcaccgactggcgcgggtatgccgtcctgccttatgccactgagtatcgtgaaaaccggatcgcgctggataccaacaccctggcggacaatgtcgaccttgacgatgcggtggtcagcgtggtgcccacccatggggcgattgtccgcgccaactttaacgcccaggtggggatgaagatcctgatgacgctgacccatcgcggcaaaccggtgccgtttggcgccctcgccaccggcgacagcaaccagagcggcagcatcgtcgcggacaacagccaggtctacctgagcgggatgccgctggcgggcaaagtgcgggtgaaatggggcgatggcccggacgctcagtgcgtggccgattaccgtctgccgccggagagccagcagcaggcgctcagtcagctttcggtcgcgtgccgctaaggagatcatgatgagaacactgcagtatctgctgggcgccctgttcaccctgggcgcaccggctgcgcttgccgccgatagcacgatcgccatcagcggctatgtccgcgataacgcctgcacggtagccggcgaatcgaaggattttactgtcgatttacaggataacgccgcgaagcagttttatgccgttggggcaacgacgccgccggtgccgttccgcatcgtgctgtcgccctgcggcacttccgtcaccgcggtgaaggtcggtttcaccggcgtggcggacagcgtcaacaccagcctgttaaaactcgatgccgggacctcggcggcggcaggaatgggggtggaaattctcgatcagcagcagtcccggctgccggtcaatgcgccgtcatccaccatgacctggaccacgctgacccgggccagaccaatattctcaacttttacgcccggctgatggccactcaggtgcccgtcaccgccgggcatgtcaatgcgacagcgacattcaccctggaatttcagtaagcggaggctgaaatgaaatggactcatgtgggctggctgctggccggcctgttaaccgcgagcgcttccctgcgggcggccgacgtcactctcaccgtcaacggcaaggtggtggccagaccctgcacggtttccaccgtcaatgccaccgtcgagctgggcgatctctatacctttagcctgatcggtgcgggctcggcatcggcctggcacagcgtggcgctggatctgagcaactgccccgtgggtacttcacgggtgaaagccaccttcagcggaacggcggacagcaccggctattacaaaaaccagggaacggcgggcaatattcagctcgaactgcagaacgaggacggcaccacgctgaacaatggcagcagccagtcggtacaggtggatgaggccagccagtccgctcgcttcccgctgcaggtcagggcgctgtccgtcaacggcggcgccacgcaaggcaccattcaggcggtgattaacgtcacctatacctacgcctgagccaggagagcatcatgatgaaaaaaataatccccctgttcaccaccctgctgctgctgggctggtcgatgaacgcctggtcctttgcctgcaaaacggccaccggggcgacgattcccatcggcggcgggtcagccaacgtctacgttaacctgaccccggcggtgaacgtcgggcaaaacctggtggtcgacctctccacgcagattttttgccataacgactatccggaaacgatcaccgactacgtgaccctgcagcgcggatccgcctatggcggtgtgctgtcgagtttttcaggcaccgtgaaatataacggcacctcttacccgttcccgaccaccacggaaaccgcgcgggtgatttatgattcacggaccgataaaccctggccggccgtcctgtatctgacgccggtgagcactgccggtggagtggccatcaccgcaggatcgttaatcgcggtgctgatcctgcatcagaccaacaactacaatagcgactccttccagttcatctggaacatttacgccaacaacgacgtggtggtccccaccggcggctgcgatgtctccgcccgcgatgtcaccgtcaccctccccgactacccgggatcgatggccgtgccgctcaccgtccactgcgcgcaaagccagcagctggggtattacctctccggcaccaccgcggacagcgccaacgcgatcttcaccaataccgcctccgcctcgccggcgcaggggataggcgttcagctgacgcgcaacggcagcgccgtcccggcgaacagcacggtctcgctgggcaccgtcggcacctcgccggtcaacctcggcctgacggccacctatgcccggaccacaggccaggttaccgccggcaacgtgcagtcgatcatcggcatcacctttgtctatcaatgatgaccgattatatcctctcgccctgctcgctggccgcccgcgggttgagccagctgatgctgaacgccgcgaagcggcccgttgagctgccggtcgagggcgtgtccctgcgcgaactggccgccgtgaagcggatcgtagtgtatctccctgacgatcccctgtggatgctcaccacgctgcgccaggcggcaaggctactcgacgaggccttgccgccgttaccgatgttgattctgagccgcagcccggccatctggctgtggcaaacgctgctctatcaggtgagtcatccggatcgtctgcgcaacgtccatactgcccccgccgatctgtcctgcgcggagctggcccatcggctggagaatgcgccgcggcttgagcggcttgccagcgaagccgccctgatccacggaaaacgggtcgtcgggttgacccacgccgagctcaaggtgatcctcgccctgctgcaagggcagacgataggcgagcaggcccaacgtctcggattgagccagaaaacgctctacacccagcggctggctggggtgaaaaagctggtggaatgtcatccgcatctggccccccgctttccgcgcacgctgctgccgcgctcacccgcaaacgcactgacggcgtttgaacaggaatgggtacaagcgattcacgatcgccaggtcttcccggtttttcaacctatcgtcgatagtcgctcacagctacagggggtggagatcctgatccgctggcgccaccgcggccaggtacttcacccccagacctttctaccgcacttccgcgccgactacacctggctactgcttacggcctttgttctgcaggaggccgtgcagaatattaatgagtatccaggcaccttctatttttcggtcaacataccctcctcactcgccgacagtgacagcctgctgcggatggtggaagccgctcgccagcagcttcggcagccagagggcgtggcaaggctggtgctggaatatgctgaaactatcgattttcgccatcagagccgctccgccgcccacgtggcgcagctgcaacgtgctggcgtgcgcgtgatgctggacgactgcttttctcaggggagcgttatctttccggcgcgtcgactgcacttcaatgcgtataaactggatatgagcatcgtcaacgacgcccagcacgatccgaaggcgcttgcgctaataaaaagcctggcctactactgccagttaagcgacagtcgctgtgtggcggaaggggtggattcactggcgaaatttacgcagttaaaatcgctggggattgatcgcttctagggctatctgttttcaccaccgatgcggcgtgaacatctcccggatctgatccgccgcttttcccaccagcgcgatccggcggatcgttgagggtgcgagaaaagcgcaccggttagcaccggtgccggtacgtcatgcgcgaatatcgtcgtattcgcgggtgttatcgaattcatgtttggcaaacgggcagagagggataatcttccgctgctcctggcgcattttttccactaccttcgccaccagctgtttccccacgccctggcctttcaggctgggatcaacatcggtatgttcgataatgctgaggtgttcgccggtgggaacaaaaacaatctccgccacctggtttccctgcgcgtcgttaacataaaatttgttatgcccttccagtatttccatcttctcctcgcttatttatgacgatattgcagagcgccgctcgggcaggtatcaatcacgtttaccaccgtcgcgacatccacttcatccgggataatccacggcttacgcttcaggttgaagagcttcgcgctgccgcgcacgcagttcccggaatgctgacagatcgccgtattaaagtagacgtcgattttctccccggtgtaggcccggtagccggcttccagtaattccttatccatgacattgcctcggtcgtttttatctttcaggctaagcatagccctcgccgtggcggctgactatgcgcaagcgcgggaattgacgcctcacatcatgctctcccatcgcacaaggatcccgcagtcaacgatcggttgactttcattcccgcaacgaggcgattacactcatgacacactggtatgatcactcagggatgttccattgaatcatattgccaccatcgcccgcccggcgcggttactgctcgtcttgccgctttccggctgctcactttcgccagagatcccggtattgggcgctgcttttcccggctggtttttctgcttactgggcggtgcgtttttactgatcccctgccatatcctgattacccgtaaaggctggcagccgcgcttttctcccctggtcttcagctacgtcgcgctgatgttcctgttcgccacgttgctgtggtttctgttttttgttcactgatcgcttatgacaacttcccgcacttccctgttacgcaaaaagtggcctctgctggcgctggtccttgccgccatcctggcgctgatcctcgttatctggcagttgcaaacctcgccggagaccaatgacgcctatgtctatgccgataccatcgatgtagtgcccgaggtcagcggacgcatcgtggagatgcccattcgcgataaccagcgggtgagaaaaggcgatctgttgttccgcatcgacccccgcccctatcaggcaatgctcgatgacgcgaaagcccggctgacgaccctcgacgcgcagatcatgctgacccagcgcactatcaaagcgcaggagtataacgcccagtcggtggcggccgccgtcgagcgcgccagagcgctggttaagcagaccacctccacgcgtatccgccttgagccgctggtgccgcaggggttcgcttcccaggaagatctcgatcaggcgcgcaccgctgagaaagcggcgcgggcggagctggaggccacgctgctgcaggccaaacaggcctcggcggccgtgaccggcgtggatgccatggtggcgcaacgcgccggggtcctggcgcaaatcgccctcgctgaactgcatctggaatttaccgaagtgcgcgcgccgttcaacggcgtggtggtggcgctgaaaaccaccgtcggccagtacgcctcggcgctgaagccggtcttcaccctgcttgatgacgaccgctggtatgtgatcgcgaacttccgcgaaaccgacctgaacaacgtgcgccccggcgtggcggcgcggatcaccgtgatgaccaaccacaaccggacctttaacggggtggtggattcggtcggctccggggtcctgcccgaaggtgggagcgtcatcgaagggctgccgctgatccagaaaagcattaactgggtccacgtctcgcagcgcttcccggtgaaaatcgccgtcagcgatcccgacccggaactgttccgcatgggcgcctcggccagcgccgtgctgcagccgtagccgggcgacgctatgtttcctctcgcccattttttacgccaggaactgcgcgacgcgccgggacgcgccagctacacgctgcgcctgacgctaagctgcgcggtgctcatcaccctgtttatgaccctgcagatccctttcctggccgttgcgctgatcgtcgtgttctacgtcagccagcctaacgtgttgatgattaagctggtcagcgtggtcttttttgtcaccgtcaccgtggcgctcggcggcgtgctgctgatcatcaagtggacctatgactacccgctgatccgcctggcggcctccgtggcgctctttttctgcgccctctatctgatgcgggtgctgggcaagctgggactggcctttttcgtggtggcgctggcggtgatttacgctcagaccttcccgtcgatgaccagccagagcgagatcctggtgcggctgctgctttggctgtgggtggcgattaacaccgcgatcctcgtcaccctgctggtcaacgcctgctttcagcaggcctttcccggtaaccagtttaaggcgcgcctggccgggatgctgcacgaggtcgcccggcggctggcggccccggacgctgaagcgccaccgaccttcggcgagaccgccgcgcagttcaatcagctgcagtcgctgttcgcccaggccagccgggcgacaccggagatcgccgccgatcccctggcctggcgctcgcggctggccgccactttgcgctgctaccagctggcggccctgctgcaagcagacgaggcggatagtgacgatcgccagcagctgtcgcaggcggtacttcagctgaagaacgcccttagcgaggagccgtttgacggcgctattcctcccctgacgctcagcggtcgcggcgtcaatcgcgctgttctgcaggagatggctaccactctgcagcggctggcgcagggtgagccggttgccctgccgcagggtgaggtggagaaggcgcccctgctggcgccggacgcctggcgcaacccggcatatctccattttgcgctcaagaccctgctggcgaccctaatctgctatgtcttctataccgctgccgactggcagggtctacataccattatgctgagctgcgtgatcgtcgcccagcccgggctgggcgccacgatgcaaaagacatggctgcgcatcggcggggcgctgctcgcctccctgctggcgctgctgttaatcgtctttgtccagccctggaccgattcgctgacgggcctgctggcgatgtccctgccggtgctggcgctggcggcgtggattgccgccggctcggagcgtatcgcctacgccgggatccagattggtttcacctttgcgctggcctttctcagctggtttgctccgctgacgaacctcaccgagctccgggatcgggtgctgggcatcctgctcggggtgctggtctcctccattgttcatttgtatctctggccggacagcgaagcgccgcagctgaaaacccgccttgcggcactctatcgccggctggcggactgcctcgccgccccgaaggaggcggttccgctggctcccctgcttgtcgccttcaccgacagcgaagcgctgatccaccgggttcgcgccgaaccgctgggcacgtatgctcacccctggccccaggcgaaagactggccgatgcgcgccaccctcgcccaggccgaggagatcgcccgcctcagcgaaggctaccgactcaacgccgcgccgggagacccgaccctggcccgctgcgccgaacagctgcggcgctacgctgaacgtatcgaacaggaggcgacggcgcctggcgaacagctgaccgccgaactgactaacccctttggcccggcgctggccgccctgcccgactgggggccgacaccgatagcgactgagcaacaggctaaaacgtcatgatgatccttcctttctccgcgcgcctgcgcggcactctttttaccctgacgctgacgttgctcagcggctgcgcgctgatccaggatgagcctgcccaggtcgccatcgtcaatccgcagcaggcccagctggcgcaggtgatccacctggcgaacagcgactggccggccgcccgctggtgggaggcctatgatgatcctcagctcaatatgctgatcaaccgggcgctgcagaactcgccgaccatgcaggccgcccggctgcgcatctcccagtcgcagtccacggtggaactcgcccggtcggcgatgggcctgcaggctaccgccgtcgcggcgcaaaaccgcctgcggatcaccgacaaatcctttagctggccctactcatactccctgccggtggataaaaacggcccctggtatacgctgaataccgttggcgtcggggcgcagctgaatatcgatctctggggggccgatcgcgcccgggtcgccgccgctattggcgagaaaaacgcccggctggcggagaccgccggcattgagctcgacatcgccagcagcgtggcgcagctctatttcgccatgcaggcgacgttccagaaaatcgcgctgctgcaggagctggagggcattgcccgattctcggtggaagcccacgagcaccggacccggcgcggtctggaagacagtgtggatgtggccaacgcccaggccgaacagctcgccgctcgccagcagatcattagcgccgaggggatgctgacccagtatcgtgaaaccctgcgggcgctgatcggcgccgatgcgcagagcatgccggccatccatccggtggcgctgccggcgctccaggagacgctgccgccgtcgctctctttcgagctgctggcccgccgtccggacctgcaggcgctgcgcggctacgtcaccgcctccctgagccaggtcgatgcggcgaaagcggccttctacccccattttgatatcaaagcgttctggggctataacgccctgagcgtcggggatctgtttaagtcctctttccagcagatcaacctgctgcccgggctgtatctgccgatcttcgacggcggccgtctgaacgctaatctgcagtcggtacgcaccgccagcaacatcctgatcaaacagtacaaccaggcggtgctggatgcggttcgcgatgtcgccatcagctccagccagcttaacgacctgaatcagcagcgcgcgctgcagcagctaaaagtcaccgcggcgcagaccaccaccgatagcgctcgcgctcattatcagcgcggcctcctcagccgctacgccgccgaagaagcccgccgggcggtcctcgcccagcagctgttgctgctggacattgaggcccagcggctaagcaccgacattaccctgatcaaagccctgggcggcggctatcgagggcagtaacaaaaatgccttcccaataggggaaggcattaagctgaagaggcggggtggatgcgcggcgattacaccagggcgcgcagctcttcccgcatataggtggaaaagaattccggatgcttaatcaccagccgttcgccggcggcgacccgttcagcccactccgccactttgtcggtaaacccagcgctccagccctgctgttggccgcgcgcagcgacgtcggccggggtggcgggtacgcccagttcttttaaatatttgagaattcccttcgcggtactttcatccatagactgtggtactggctcagacgtattcataccaccgatgaaatccaatgctttatcaatgactgctggcataggtgtgtccttatattaaccacatagtaaacctgactacactatggaccggaaagcgacgtgatttcaaagaacacgctcacgttatgggacatcgcgcattgtgaaaaggggattttgttctgctggggcggggattggacaaaaaacaagccggccccgtagggccggcctgaggatcgcgtcaggcgttgctgagggatttttgcgcggcgctggaccgactgttctccagcatccggcggaccgggacaatcagcacggccagcacggcggcgcagatcagcaatgcgatggagcagcgggcgaagaggtccggcagcaacgacagctgatcggccttcacatgaccgccgatcaggcccgccgccaggttacccagcgcgctggcgcaaaaccacagccccatcatctggccgcgcattctctccggcgccagcagagtcatggtcgccagcccaatcgggctgaggcacagttcaccgagcgtcagcatcaggatgctgcccaccagccacagcggcgacacaccggccccgccgttgctcagaacgttctgcgccgccagcatcatcaggccaaagcccgccgctgcgcacaggatgccaatcacgaatttggtcatactgcccggacgaacgtttttacgcgccagcgcaggccacgcccagctgaataccggcgcgaggagaatgataaacaaggcgttaatcgactggaaccagaccgcggggatctcaaaatcgccgatcatccggttggtatagtcgttagcaaacaggttgaaggaggtcggtttctgttcaaacgcggaccagaaaaaggccgccgagaccagcaaaataaagcataccagcaggcgcgcccgctctttacggttgagtccggcgaagacgaacagccagatgaaatagagcgccacggaggcggcaattacatagaccagcacgctggccaccgccaccgggttaatcacgatcgtgcccaggctgataagcgtgaccagcaccgccactcccagagccagcgccagcagccacgctccaacgccattctttttcgccaccgggctgttccaggtggaatcgaggccaacctccgcgtcatagcgcttcatcgacggtacggcaaagacacggaaaatgatcagcgccaccagcatcccgatccccccgatgccgaagccccagtgccagccatgcgatttgataagccagccagagatcaatggcgcgataaacgagccgatgttgatccccatgtaaaacagcgaaaaaccaccgtcgcggcgcgcgtcgccctttttatacagggtgccgaccatcaccgagatacaggttttaaacaacccggaacccaggacgataaacatcagaccgataaagaacagatcgttgcccagccatgctgacagagcgatcgacaggtgccccagggcgatcaggatagagccgtaccagacggcgcgttgttggccaagccagttatccgccagccagccgccaggcagcgcggccagatacatactgccggcaaaaatcccaacgatcgccgaggcgttctctcgcgccaggcccatgccgccgtcgtacactgtcgccgccataaacaggatcagtaaaggacggatgccgtaaaacgagaagcgctcccacatttcagtgaagaacagggagcccagcggataaggatggccgaaaaaggtacggctttcgtttttattaacagaggaatgcataaattctccaggtaaggtgcgccgcagcgcaagttaaccgtataaagcaggctgacgatttataatttgtttgcattaacatcaaacacgagcatttttaaccatttgataaccacgcaatggttttgtccagccccttaccttccctttttagatgaaaagtcgacaaacatctagttttacagatttaatgttcgcaataatgcaaacgacgttgactttatatcattacgcacaaaacgaaattttacccattaaaaacaaacagttaataatttatcgagagacataaaccaccggcgcagaggcggtgtataacggcaggaaaagtaagggaaacagactggatagtggagaaatagcgctaagcgagaatattgtcagcaatccaggcgctacatacctggagagcctaccatacagcaggtttaacacggcatgccggctgctacagccggcgccattctgcgcgctatttcacacgctgccctgcggcatcaatgactggctcaccgtcctccttcacgaatgcgcctttttgtggcgccgtcaggatctccagcaccacctctgacgggcggcagagtcgggtgccctgcggcgtcgttacgatcggacggttaatcaggatcggatgctgaagcataaagtcgattatctggtcgtcagtaaaccggtcttccgccaggcccagcgcgtcgtagggttcgacgtttttccgcagcagcgcgcgcaccgggatccccatcgcggcgagcagctggcgcagctcatcacccgacggcggcgtctccagataatagataacggtgggctcggcgccgctgttacggatcagcgccagcgtattacgcgaggtgccgcagtcagggttatggtaaatggtgatgctcatagtacgttctcatggctggttgaaggagagacgcagcgccagcgcggccagcgtcacaagcagcaccggcagggtcatggtgatgccgcagcggaaataatacccccaaccgatggtgatgtgcttctgcgccagcacatgcagccacagcagcgtggccaggctaccaattggcgtgatcttgggccccagatcgcagccgatgacgttggcataaatcatggcctctttgatcgtccctgttgccgtgctgccatcaatcgacagggcgccgaccagtacgctgggcatattattcattattgaagagaggaaggccgacaggataccggtgcccagcgtcgcggcccagaggccgcgctccgccagcatgttcagcaccgtggtcagataatccgttaacccggcgtttcgcagaccatacaccaccagatacattcccagcgagaagatcactatctgccacggggcgccgcgcagcaccttgccggtgttaattacccgcccgcgcttcgcgacagcaaacaggatcccggcgccgagcgccgcgatggcgctgaccgggatccccagcggttcaaggacgaaaaagccagccagcaacagcagcagcacgccccagccggtgcggaacgtcgctggatcttttatcgccgtggccggcgcttttagtaacgccatatcccaggccggcgggatatccttgcgaaagaacaggtgcagcatcgccagggtggtgaggatcgccgcgagatcgaccggcaccatcaccgaagcgtactccctgaagccgatggcaaagaaatctgccgaaacgatattcaccagattcgacaccaccagcggcaggctggcggtatcggcaataaatccggcggccatgacaaaggccagcatcgttcccttgctgaaccccagcgctcgcagcatggcaatcacgattggcgtgaggatcagcgccgccccatcgttggcaaacagcgccgccacagccgcgccgagcaggataatccaggtaaacagcagacgaccccggcctcttccccagcgggaaacgtgcagcgcggcccattcgaaaaagccagactcatcaagcagcaggctgataatgataacggcgataaaggtggcggtcgcattccagacgatatgccataccaccgggatatcggctacctgtacgccaccggtggccagcgccagcgccgcgccaaatgccgcgctccagccgatccctaacccccgcggctgccagatcaccagcaccagggtcaggataaaaatcgtacctgccagcaacatcgttcctccgccaatcacattcgaaaaatcatatatgttaagataaattttttaccggcaacccggcccgccagccagtctgctgatcatcagccgcacatcctcctgctgactgagccaggcctgctcaatcacctgcgccgcccaggccggcatctgcggagagaggcggtaatggacccacttaccctgtttacgatccagcagcaatccgctctcacggagcatcgccagatggcgggagatcttgggctgggactgggcgagcgccgtacagagatcgcacacgcacagctctccacgcgccttgagcagcaatacgatccccagccgagtttcatcggcgaggtttttgaacagttgcaggggcaataaagacatgatttctcctcaagcgtgacggacagcatacggggccacaaagaaagatcaatatacatgcgcaaaaacatatatattaattcacgtctgcgatgagcatccgggatgttgcgccccgccatccctgctaaatagcacggaaaaatgccgcgttttcttttatccatcatcgaaatatgtcaggctggagatcccattggattgccagggctttcaggatgagtacgatttatgtggttgttttaacgtatataaaaccgctcgaagaggttgaccgtgcgatccccgcccacatcgaatggctcaaaaaaggctatgccgacggcctctttctcgcctccggccgccgtattccccgcaccggcggcgtcattctggcaaaatgcgatagccgggaaactctgcaagcgcgtctgagccaggatcccttccagcagctgggtctcgcccgtacagagattattccctttgaggccagcatggcgtcacccgcgctgcagtcgctgttataaccctgtctgaaagcatatcccggaggaaaaatgcagccgtactttcactggatcaatgaacctgccgagtggcgccgcgattccgacggcctgacggtggtcactaataagcataccgacttctggcgccatacctggtatggcttcgagcgcttctctggccatctctatgccgcagaagtggcgggcgattttaccctgcaggcaaaaatctgtgcggatttcaccacgctttacgaccaggccgggctgatgatgatggccgacgagcagacctggctgaaggcgggaattgaattcaatgacgatgccccggccatcggcagcgtactgacgctaacccactccgactgggccaccgggcttttccccggcgacccgcgcaccttctggctgcggctgacccgcaagggcgacgcgttaaggctgcagtattcaaccgacggcgagcgctggccgctgctgcggctcggctactttccgccaggcccggtgaaagcgggcgtcatgtgctgctcaccggagcgtggcggactggcggttgcgtttcaggatattcagctttccccgccgctggacaaagcgctgcacgatctgagctgaacgctagcgggaagacccgactttctctgcatcatccgcggcatgcattatcaggaaatcaatcagggctttcacccttttcgttctgcccgcgttttttgggtaatagagataaaccggcggataggttttccagtagtcctccatcacgggaataaactgctcacgatcgggctgtaattgcaggattggttcaaataaacggccaatccccagtccgtggcgaataccgtcggccatgacgtcaatatcattgctgattaactgtccgggcatctcgacggtgagctgctcgccgtggtcattgaggatcagcggcaggatgcggttgttggtaataaagcgatagccaatcagccggtgatgatggagatcggcaggcatcgcgggcacgccatattcggcaagataggcagaggaggcgtatagcccttcacgaaacggcttcattaacgggcgggcgaccacgccgccttcgagaatatcgccaaagcggatcccaaggtcgaaacgttcttcaataatattgacggtaccgtcatagaccgatatttccagctggatccccggatattgctgacaaaatgccgccatcgccggtttgagaataagcaggtaggcaaagcgcgagagggttattctcactgccccggagggctcctgattctggtcgcggatgatttccagcgacttttccagtgtctccaccgccgcggcggtctgctccagcagctgttgcccggtttccgtcagctcgatacgccgggtagtgcgcacaaaaagggggtggccaatatgctcctccagcagcctgagcgcattgctgaccgacggcggcgtgatttcgagcttgcgcgcggcggccgagatattgccctcgcgcgcaatgctctgaaagatgcgtatctgattataaagcgcgttattcatagcatctccttaagacaccctcgcctgattattaagtacaggctaaatattcttaagtcaatgaccgcctaatcttcccccctgcggctcgtatacttttgtctcttcccgctgataacgactttccggagacaactatgcgaattttatgtctggatatccctgcccccggcgcgacgctggaacactatgcgccgcaccttaccgcagaagccctgcacgcctggggactgtacaagtcaggctttattcgcgacatctatttccgtcaggatcgacccggcgtcgctattttcctcgagtgcgacaccgtggaagaggcgaataatgtcatggccgaatttccgctggcaaaagcgggtctattaaccttcgagtgtattccactcggctcgtttattagctgggaaaatctcttctctgctgaatttaaacatcaggagtaacgttgggaatggctcatattcttgtcgtttccgggcatccggatcttaaccattccatcgccaacgccaccatcctcgatgagctggcgaccgccctgcctgatgcggaaatccgtcgtctggactggctctatccggacggcaaattcaacatcgccgctgagcaggaaagcctgctgcaggcggatgtgattgtctggcagtttccctttagctggtatgggctgcccgggttaatgaaacagtggctggacgaggtatttgtccacggcttcgcccatggctcaacggcgaaactgggtggtaaaaagctgatcctctccttcaccacgggagcgccacaggcgctctataccgctgacggtttctttggccatgccattgaggagtatctccttcccttcgagaccacggccaggctgtgcaatcttgagctgctggcgccggtttatacctgcggtattagctacgccgaccgggatgcctacaaaatcgctcagcaaaaaacgcttgcccgggaacacgcggccagactgatcgcgcagcttaaaactctggtggaataacccaaagggagaaaataacgatgcagtatacccggctcgggaagagtgacttactggtctcccgtatctgcatgggatgtatggggtttggcgatccgtcaacgggtcagcatcgctggacgctggacgaaacagccagccgggacatcatccgccacgctctggaacagggcatcaatttttacgataccgccatcgcctatcagaacggctccagcgaacggtacgttggccgggcgctgcgggagatggcaaaacgcgaggaggtggtgctggccaccaagtttctgccacgaaccgctgcccagattgccgaggggatcagcggaaaacaggcgatagcccgctcgcttgaccagagtctgcgaaacctcgggatggactacatcgacctctacatctaccacatctgggattacaacaccccggttatcgacgtgctggaggcgctgcacaccgcagtgaccgccggcaaggtgcgcgcgattggcatttccaattgctatgcctggcagttggcgaaggtgaacgcccttgccgaacgcgaagggctgacatcctttgtttctgtgcagagccactacaacctgattatgcgtgaagatgaacgagagctgttcgggctgtgcgcggaagagggtatcgccatgactccctatagcgcgctggccagcggccgtctctcccgcttagaaggccacacgcggcgagcggtggaagatgattatgcccggggcaaatacgacggcacggcagagcaggaccggatcattattgcccgcgtcgccgaacttgccgaacggcatcaggtctccatgaccgaaatttcgctggcctggctgctgactaaagtcaccgccccggtgatcggcgccacgcaaaagcatcatgttgacggcgcggtcaacgctgtagcccttcaactgagcccggaagacatccgttatctggaagaagcctaccagccgcacgttctcacaggcgtgatggcgcaaaacacgccgcaagccaaagaccatcatcaggtgtggacgcggtaaccctctgtcctgttcagcagggagaataaaacatgaaaaacgtgattgccgcggcagccttgtcgcttgtgctgtctgattttacttatgcccacgaacaaagagatgaagctatgatgaaaattaccccttccacccttgcggacgctgatattcaagcggtctccccggcgctggcgcgcttcggccgcgaggccatcagcaacgacctctggcaacgtgacgccctgtccgcccgcgaccgtagcatcgtgaccgtagcgatgctgattgcccgcaaccagccaggcgagctgaagcactatattgccgttgcgctcgatagcggcgtgacgccagcggaagtgtcagagatcattactcacctcgccttctacgctggctggcccaatgcgatgtcagccgtcagcgtcgctaaaaccatctttgaagccaggggcgtgacggcagaggccctgcccgccgcctcgccaacgctgctgccactcaatgaacaggtagagaaacagcgtgcagacaccgtggaaaaaaatgtcggccccatttcgcctggcctggttaaatttaccgccgacccgctgtttctcgacctctggcaacggcccgcgcttacgccccgcgacagaagtctggtgacggtcagcgcgttaatcgccgccggacagagcgcgcagattggctaccacctaaacagagctatggataatgggctttcggctgaagaggccggagaagtagtcgcccaggcggcgttctacgcgggatggccaaatgcgtttaccgccgccccggtggtcggtgaggtattacgatcgcgcgagagcaaaactgaataaaaaagaataaaggacagggaagctgtcctttatttatcgttaattgttaatttaaaggtaccacgagggctttcgattaggtctcgcggaaagaacataaacggtctatcgaagtatggagacttcgatcgtgagtctgttcacatcgctcattgagaaaattgccgttccgtatgccgtcatgagtctcatcctttgaaagcagcgatcgctgtggcgagacggtagcgcggacatgtctatttggtccagagatggacatctcaatttagctactacaccgctacttcgattgatgtattttatattaaatatcaatgaattgaattatacatttaatataaattgatgttatagcaatcgctatacaggctccttagtcatgactgaccgggccacaccgcatatcgcaagaatttgctctctcagccagcggtgaccggggtcgcgttccattcttgggtgccacatctgcgataccgtaatacgacggcttttgaacggcagctcgaaaaggtgtacctggtccgttacctgctgattgagtaaatagagtgcgggtatcatggcgataagatccgattccagcgccacggaaagtgctgtcggaaatcccggtacgacgcttgcaattttacgttttgtccccagttcggccagcgcatcgtcaacggatccgtgcaacgcgccctcgggtgacgctaccacatggccccaggcgacataatcactcacgcctatttcagcctgcttagccagcgggtgccctttacggacgacgccaacaaaccgatcctcaaacagtcgttgcagccgtatttctggccccatattactctgaacgccaatctccagatcaaccagcccttcccgaagatagcgcgacgttttttccggcttaggcgcgaagcgtatacagacgtccggcgctgcgtcggcaaccgctgctataagcgcaggcccaaacgccaccacaaaaccatcgtttgccctgatggtaaaaagacgcgccagattttgcgcgctgaacgtttcagttgagggctgtaataccgccctggcatcgtgcactgcacgcctggcgcgatcccgggtcgcttcggcccacggggtcagtaccatgttacgcccggcgcgtaccaggatcgggtctcctgtgacatcgcgtaacctgcttaatgtccggctcatggccgaagtgctgaggttcagacgacgagccgcacctgcgacactcgcttcactcagcaatacgtcgagagctaccagcaaattaaaatcgggatcagacattacccttcctcccagcacattaagataaggcgtttgatgcaacaataaagtgaaaatagtgcgccttccgcctggtaaaagccatctttatagttttgtcatccatacactcttctcagaggacaaatgatgacgctcttttccagtcaacccggcgacgaaggactgcctggcccggcgcgcgcacgggtgatggccgcaataatgaccaccaccttaatgggcgtgtttgatggcaccatgatcaacattgccctgccctccatggctcaggagatgcaggtacctgccagtattgccgtctggttcgccaacgggtatctgctggcggctgcgatgacgctggcgatattcgcggcgcttgcggcccgtctgggttatcgccccgtatttctggcgggcctgacgacctttaccctgacatcactgggttgtgcgctggcgaataagcccgaagtgcttatcggtatgcgcgtacttcaggggatcggcggcgcggcgacgctgagtattgcccccgcaatactcaggtccgtatttcccggacgcttacttggccgcattctggggttccatgccctgctcattgcctcgagctccgctatcggcccggtattgggcggtacgatccttcacactcttagctggcaatggctgtttgcgataaacattcttcccggcaccctcgccttactgctggcggtcagagcgctgccgcgggatgcgatccgtatgcaggcgcccttcgacaccgtgggcgccatattgtcggcgctgctgttgggttcgacgatcatggcggcgaacagcctacagaacgctacttctcaattcggcagcctttgctggatggctctcgctgcgctgagcggcatggcttttatctggcaaatccgccgcacgggtcatcccttactgccgccgagcatgtttaaaaatgaacgttttaccctcgcggccttcacgtcgatggttgcttttgtcagccaggggatcacctttattgcgctacccttcctgtttcagagcgaatacggctacagtccggtagtgtctgccctgctgtttacgccgtggccattagggatcgtgctgattgcgccgcatgcaggccgttgggcggacacgatatcagccccggcgatatccaccctggggctggtgatatttgtcgtcggtttgatcctgctggcgacgttacccgccagaccttcaatgtgggatatctgcctgcgaagtctggtatgcggaatagggtttggctgctttcagagtcccaataaccgggaaatgctctcaaacgttattcgtgagcacgcgagttatgcgtccggtgttttatccattatgcgcactttcgggcagtgcctgggagccgccgccgtagccgttctgctggcagcagatgaaaggtcaattcatgttgcgctgtggagcgccgccgcggcctctgcggtatcggtcgtcgtcagcgcgagccggttgcgtaaaatcactcatcctgcggaaacaggataagcgcggaaatatcactaaacgctacgactccagcgccagcagcgcaaaacgccgatcccgcaaccaaagtggagtcctctaccggagttcaatagactaacagaatgctataatcgctgatttatcaagggaaaattgagttgggtagacttcaggagacttgaatttggagcgggcgaagggaatcgaaccctcgtatagagcttgggaagctctcgttctaccattgaactacgcccgcgaagaggtgcgagaagcattatagcccttacgcaccctgtgacaagcctgccggatgctgactggcgataaaataaccttttagcacttaggtttacttccctgcggcggcaggtaacgcagcggatcgatggctgtcgcccggtagcggatctggaaatgcagccgcactgagtcggcatccgtactgcccatggtggcaatttgctggccggccttcacgctctggccattattcaccattagcttatcgttgtgggcataggcggtgatgtaatcctcgctgtgcttaatcatgatcaggttgccatagccgcgcagctgattgccgacgtagaccaccttgcccgccccggcggcatacaccggctggccgcgggttccggcgatatcaatgcctttattgccgccatcggcggtggaataaggcaggaccactttgccgctggtcggccagcgccagcagcgctgtcccaccggcggccaggaggactgaggtaccgcggacgaaggcgtgaccgccgcggtgcgcgtagaggaagattttttcttcgttgtcttcgttgaactgctgccgttaagcttcagcttctgccccacctcaatggtgtaaggcggggagatgttattcaggcgggccagatcgcgaacgctggtgccggtggtgcgggagatgccgtacagggtatcgccgcgtttaacggtgtaggtgccaccggaatcggaggtgctggagcagccggccagcaccaggcttgccgccagcatcagtgtcatataaaagcgtttcatcatcaggcatcctgcacttaacacaaccacttacctcgcaatcagggcgaatatcataccagtccgcggcgcagggcgtcatccctgatggcgaaaccattatcccccgtccctagcgcgcggtctgcggcaggcagaaattcatatttgcgccacgcggcgcggcggcctctcctcactattgcgcgttgccgttcacagagctgcctccagggcttgttttggtaatgcctttctcccatttatgggctaccctagtggcctgagtacatgacccggcgggtttgtgccgggtcattttttattttcaggagtcgtcatggccggggaacacgtcattttgctggatgagcaggatcagcctgccggtatgctggagaagtatgccgcccatacgtttgatacccctttacatctcgcgttttcctgctggctgtttaaccagcagggtcagttactggtcactcgccgttcgttgggcaaaaaagcctggcccggggtatggaccaactcggtctgcggacacccccagcagggcgagaccttcgagcaggccgtcacgcgccgctgtcgcttcgaactcggtgtggagatctctgatatcgcgccggttcacccggccttccgctaccgggcggtcgccccaaacggtatcgttgagaacgaagtgtgcccggtatatgccgcgcgcgtggtaagcgaagtgcagcctaacgacgatgaagtcatggactatcagtgggttgacctggcaaccatgttaagcgcgctggccgccacgccgtgggcgttcagcccgtggatggtgctggaagcggaaaatcgggacgcccgccaggcgctgaccgactttgttgcgcgtctgcgcgggtaagctaactattctccaggccaggcgcagccctgtgcctgtcattaatgcctggcggcgctacgcttgcacaggcctacggttctgcgccattgcgtagcccggataaggcgtttacgccgtcatccgggatccccggcttgcgctgcgctgagccaggctacgccagccttaggacctcacatcagacataaaaaaacccggcaagccgggttttttgcttttcgcgaagggcgattatttctgcggacgcatcgccgggaacagaataacgtcgcggatggtgtggctgttggtgaacagcatgaccatacggtcgataccgatacccagaccagcggtcggcggcaggccgtgttccagcgcggtgacatagtcttcgtcatagaacattgcttcgtcgtcgcctgcggctttcgcatcaacctgatcctggaagcgctgcgcctggtcttcggcgtcgttcagctcgctaaagccgttaccgatctcacggccgccaatgaagaattcaaagcggtcggtgatttccgggttgacgtcgttacggcgcgccagcggagaaacttccgccgggtattcggtgatgaaggtcggctggatcaggtgcgcttccgccacttcttcgaagatctcggtcacgatacggcccagaccccagctcttctccactttgatgccgatagattcagcgatcgctttcgcggaatcaaagttatccagatccgccatctcggtttccggacggtatttcttgatcgcttcgcgcatggtcagtttttcaaacggcttgccgaagtcgaacacctggtcgccgtaaggcacttcggtattgccgaggatgtcctgcgccagggtgcggaacagagattcggtcagctcgatcagatctttgtaatccgcataagccatgtagagttccatcatggtgaactctgggttatgacgaacggagatcccttcgttacggaagttacggttgatctcgaagacgcgttcgaagccgccaaccaccagacgcttgaggtacagttccggcgcgatacgcaggtacatgtccagatccagcgcgttatgatgggtgatgaacggacgcgcggaagcgccgcccgggatcacctgcatcatcggggtttctacttccataaagccgcggccaaccatgaactgacggatgcccgccaggatctgcgaacgcactttgaaggtcttacgagattcatcgttggaaatcaggtccaggtaacgctgacggtaacgcgcttcctgatcctgcaggccgtggaatttgtccggcagcgggcgcagagctttagtcaacagacgcagctcggtgcagtggatagagagctcaccggttttggtcttgaacaacttaccgcgggcggcgatgatgtcgccgaggtcccactttttgaactggtcgttataaacgccttccgccaggtcatcacgcgccacgtacagctggatgcggccgcctacgtcctgcagggtcacgaaggaggctttacccatgatacgacgggtcatcatgcggccagcaacggccacttcaacgttcagcgcttccagctcttcgttttctttgccatcgaagtcagcgtgcagttggtcagaggtatggtcacgacggaaatcgttcgggaatgcgacgccctgctcacgcagcgcagccagcttctcgcgacgggttttcagttcattattaaggtcaattgccgcgtcagcgccctgtgcttgttgttcagacatgttggttcctcataaccctgctttcaaacttgcttcgataaattggtccaggctgccatcgagcaccgcctgagtgttgcgggtttccaccccggtacgcagatctttaatacgcgagtcatccagcacgtaagagcggatctggctgccccagccgatatcggacttgttgtcttccatcgcctgcttctcggcatttttcttctgcatctccagttcataaagctttgctttcatctgcttcatggcctggtctttatttttgtgctgcgaacggtcgttctggcactgcgtcaccaatccggtcgggatatgggtaatacgcaccgcggattccgtacggttaacgtgctgaccaccggcgccggaggcgcggtatacgtcaatgcgcaggtcggccgggttaatttcgatatcgatatcgtcttccacttccgggtaaacgaacgcggagctgaaggaggtatgacggcggccgccggaatcgaacgggctcttacgcaccagacgatgaacgccggtttccgtacgcagccagccgtaggcgtaatcgccaatgatcttaatggtcacggatttaatccccgcgacttcaccttcggattcttcgatgatttcggtcttaaagccgcgcgcttccgcccagcgcaggtacatgcgcatcagcatgctggcccagtcctgggcttcggtgccgccggaaccggcctgaatgtcaaggtagcaatcggcgctgtcgtattcgccggagaacatgcggcggaactcaagctgcgccagcttctcttccagggtatccagctcggcgacggcttcgttaaaggtctcttcgtcatccgcttccacggccagatccagcaggccggcaacgtcttccagcccctgggacatctgatccagggtatctacgatggcttccagggaagaacgctctttacccagcgcctgggcgcgttcgggttcgttccacacgtccggctgttccagctcggcgtttacttcttcgagacgctctttcttggcatcgtagtcaaagataccccctaagaacgtcggagcgctccgtgaggtcctgaatgcggttttttaccggatttatttcaaacatggtcggtttcttttaatggatttgtcaaaatgcggtgataagagcggaattctaccggattcgcgcccttattcctacactgttgtcaatttggccagaggtgatcgatgatcagctgcaggctacggttgccgcggaactcgttgatgtcgagcttgtaggctaactggacttcacgcacgccgttatccggccagatggaagtatccacgttgaaggcgataccgtccagcagcggcccgccgtcaaccggttcgaccatcaccttcaggtgacgctcgcccaccagccgctgctgcagcaggcgaaaacgaccgtcaaacagcggttccgggaacatctgcccccacggcccggcgtcgcgcagcatctgcgccacttccatgctcatctccgccgccgccagcgggccatcggaaaccacctcgccctgcaacagcgcaggatccagccattcggtcaccagctcgccgaagcgctgttgaaactcttcaaaacgcgcctcctccagcgataagcccgccgccatcgcgtggccgccgaacttcaggattagcccgggataaagcgtatcaaggcgctccagcgcatcgcgcatatgcaacccctgaatggaacggccggagcctttcagcgtgccgtcgccggtaggcgcaaaagcgataaccgggcgatggaagcgctccttaatccgcgaggcgagaatgccgactaccccttgatgccattgcggatggtacatcgccagcccgccgggcagggtatcggcgctgcgctccagctgctgacagagcgttagcgcttccgcctgcatcccctgctcaatctctttgcgcgtctgattaagcgcatcgagctcgttggccagcacccgcgcttcgccgatgttgtcgcacagcagcagcgcgacgccgaccgacatgtcgtccagccgtcccgccgcgttcaggcgcggcccgagggcgaaaccgaggtcgctggccgccagcttttgcggatcgcggttggcaatttccagcagcgccttaataccgggccgacatttgccggcgcgaatgcggcttaacccctgccaggtgaggatacggttattagcatccagcggcacgacgtccgcgacggtgcctagcgccaccagatccagcagctcggcaaggttcggcgcggggatgccgcgagcgtcgaaccagcctttatcgcgcagaaaagtgcgcagcgccagcatcagataaaacgccacccccaccccggccagtgattttgacgggaagtcgcaatcgcgcaggttgggattaacgatagcttccgccgccggcagcgtctcgcccggcagatggtgatcggtcaccagcaccgggatccccagcgcatgggcatgatcgacgccggcatgggacgagatcccgttgtcgacggtcatgatcatctgcgcgccgcgagcatgggcctgatcgaccacttccgggcttaaaccgtagccgtcttcaaagcggttcggcaccagataggagacgttgccgtaacccagcgcgcgcagggccaacacgctgagcgcggtgctggtggcgccgtcggcgtcaaaatcaccgaccaccacgatgtgcaaccctttctggaacgcgtcatgcagcatctcgaccgctttttcaacgccggtgagctgcgtccaggggagcatgcctttgacgctgcgctccagctcctgcgcgctgcgcaccccgcggctggcatatagccgctgcagcagcggcggcaggtcggcggggagttcgacgccgtcaatcgcctcgcggcggcgtagttgtatctgttgtttcacgcgaatcagttaccgcttgtctgttttttgtgctcatcaaggaacgccttcagctctttcggcccctgatagcccggcagcaccatgccgttactgaggaccatcgccggcgtaccgttgacgcccatctgcacgccgagggtgtaatgtttggcgatatctacgctgcagctcgccggctgcacgcctttaccattcatggcgtcatccagcgctttgttgcgatctttcgcacaccagatcgctttcatatcctgctcggcctggctttgcagcccctggcgcgggaaggccagataacgcacggtgatccccagcgcgttgtagtcgctcatctgctcgtgcagtttatgacagtagccgcaggtaatatcggtgaagacggtgatgacgtgctgctccttcggcgctttgtagacaatcatctcattgctcagcgcgttcagcttacccagcagcagctggttggtgacgttgaccggctgcgcgccgctcacgtcgtacatcggcccctggatgatatgtttgccgtcgtcggtcacgtacagcacgccgctgtcggtcagcaccgtgctcatcccggaaaccggcgatggttgaatatcggtgctctgcacacccagcttcgccagcgactgtttaattgccgcgctatcggcgtgcgccgctcctgaaagggaggccgccagcagggtgaacatcaataaaccttttttcatactcagtccttttgttcagcactcacgcccgcgggtggtgctgttgatgaagttgtcgcagacgctcggtcgccacgtgggtgtatatctgcgtggtggagagatcgctgtgtcctaacagcatctgcaccacgcgcagatcggcgccatgattgagcaaatgcgtggcgaacgcatggcgtaacacgtgcggggaaagcttttcgctgtcgatccccgccagtacggcatagtgtttaatccgatgccagaaggtctggcgcgtcatctgctgggcgcgctggctgggaaataagacatccgacgccacgccgttcagcagccaggggcgaccatactcgaggtaattttccacccacagtaccgcctcttcccccagcggcaccagccgctctttgttgccttttcccaccacccgcagcacgccctgccgcaggctgatgtcgctcatcgtcagccccaccagctccgagacgcgcaggccggtggcatacagcacctccagcatcgctttatcgcgcaattccagcggctgctccaccagcggcgcctgcagcaggcgctcaacctgcgcctcactgagatcttttggcagccgctgcggtagcttcggcgaggccagcagcgcgctgggatcgtccgggcgaattttttcccggtacagatgctggaaaaaacggcgcacggcgctcagcaggcgcgcggtgctggtggctttgtagccgccggactgccgctcagccagcagcgcctgcagatcgtcgctgccaacgcttgccagcgacaggccgcgatggtgcaaccactcaactaacatcgtcaaatcgcgacggtaggcgctgagcgtattctccgccaggttgcgctccagccaaagggcatcgagaaactgttcgattagtgccagatcctgtttcacatcggcctctttgttcgttaaacgctctcattatgccttaagaggacgcctttctggtacactgcccgccattcacggcaagaatcgagatgtttacgcgatgaatataggtctgttttacggctccagtacctgctacaccgaaatggccgcggagaaaatccgcgatatcatcggccccgaactggtgacgctgcacaatctgaaagatgactcccccgcgctgatgagccagtacgacgtactgatccttggcatcccgacctgggatttcggcgaaattcaggaagactgggaagcggtctgggatcagctggacaccctgaacctcgagggaaagatcgtcgcgctgtacggcatgggcgatcagctgggctacggcgaatggttccttgacgcgctcggcatgctgcatgacaagctggcgaccaggggcgtgaagtttgtcggctactggccaaccgaaggctatgagttcaccagcccgaaaccggtgatcgccgatggccaactgttcgttggcctggcgctggatgaaaccaaccagtacgacctgagcgacgagcgcatccagagctggtgcgagcagatcctcggcgaaatggccgaacacttttcctgacgcggcttactcctgcgccggtttttgcagcaccagccggcgcagatcgcgccactctccggcgtccatgctgtccgccgccagccaaagatgctgtccgcgccgggtatcgacatggcgcaaacgcagcagcataccgctattgataacccacggcgtcccgaggatttcccattcggcgttttgccagcgaagacgggaatcggtgagcagttttatctccccgcgacgggcatggatccgccgctggctgcgcacgcagtcgaagaccaccagcgacagcagcagccagatcggggtatagctcagcggccagggaaccaacagcaccagggccgccaccacgccgtgaagcagcagggaaaaccactgcgcgcgccaggagatacggagatcagattgccacaggaccacgttcccgattccgtgtctgaattaaggttaccatccgctgcagctccgcatcggccggtttgccgtggttcatcagccagttgaacagatccggatcgtcattttccagcaggcgaatgaacagctgtttgtcagcgtcgctgagggtatcgtactcatactcaaagaacggcatgatggagatgtcgagttcgcgcatcccgcggcggcatgcccagtggatacgtgctttattgttaatgtccatgttgaccttccagcagcaaaatataggttagtttaacccgttttctgccgtaactttacaggaatatcgctgaatgcgagcatccttccataaaaaccttaaaataatgatgggtttattgattccctgcgtcaggcggctgtctcacgccagcgcacaaatggcctgttgaaagcacttgcaatgcactatagctcttttaccattggtcacacacactgcgttaagcgattcaggatatgactatggcttttacaccttttcctccgcgtcagccttcctcttccgctcgtctgccgttaacgctgatgaccctggatgactgggcgctggcgacaattagcgggccggacagcgaaaaatatctgcaggggcagattaccgccgatgtgagtcatctcaccgatgcccagcatctgcttgccgcccactgtgatgccaaaggcaagatgtggagcaacctgcgcgtattccgtcgcgagggcggcttcgcgtggattgagcgccgcagcctgcgcgacgcgcagctgaccgagctgaaaaaatatgccgtcttctccaaagtcaccattgccgccaacgacgatctggttctgctgggagtagccggcttccaggcgcgcgccgcgctggcgccgctgttcgccgccttgcccgacgctgccaccccggtggtcagcgaaggcgccaccagcctgctgtggtttgaacacccgggcgagcgcttcctgctggtgaccgatgtcgacaccgccaaccgcgtcaccgacgcgttgcgcggcgaagcgcagtttaacaacagccaacagtggctggcgctgaatattgaagccggcctgccggttatcgacagcgctaacagcgggcagttcattccgcaggccaccaacctgcaggcgctgggcggcatcagcttcaaaaaaggctgctacaccggccaggaaatggtcgcgagggcgaaattccgcggcgccaataagcgcgcgctgtggacgctgtcagggaccgccagccgggtgccggaagccggggaagacctggagctgaagatgggcgacaactggcgccgcaccggtacggtgctggcagccgtacagctggatgacggaagcctgatggtccaggtagtgatgaataacgacatggaaccggacagcgtgttccgtgtacgcgacgatgccggcagcctgagcatcaaaccattgccgtattcgctggaagaaaattaaggaaaagttcccggcttgcggcgcttgcgccttagccgggctacccggccgcagaatatcgtagccacggtaagcgtagcgccaccgtggaatttccaggccgtagagtattgtagccacggtaagcgcagcgccaccgtgggatgtttatcaggactggccgatgtaaagataaatcgccaggaagtgacacacgctgccgccgagcacgaagccgtgccagatagcgtggttataaggaatacgtttgcagacgtagaagatgacccccagcgagtacaccaccccgcccaccgccagcttcaccgccagctgatagaccacgataagcgacagccaccccatggtcagataggtcaccagcgacaaaattttaaagcggtgcgcgatggtcagcttaaacaggatccccagcagcgccaggctccagatgacgatcatcagccccttcgccagcggtgaattcaaccccaccagcaaaaacggcgtgtaggtcccggcaatcagcaaatagatggcgcagtggtcgaatttcttcagccactgtttcgcccgctgatgcgggatcgcgtgatagagcgtggaagcgaggaacagcataatcatgctgccgccgtacaggctgtagctggcgatcgccgtcgcgctggcgtttgtatctgccgcctgcaccagcagcaacacaaggccgacgataccgaacaccagcccgatcccgtggctgatgctgttggcaacttcctctgccagagaatatccctgagtgattaatggtttgcgaaccatactggactccgtgaaaacaagaacgctttcattgcccacttagggtaactgagaatgattccagtgaacacctgttagctaaaataaaacgatgtatatttgtaaatactttaaaatcataaagttacatttttatttcaactcacagctgttcctgattatcttaaagcgctttgaattcaatgacataaaactggctctcgccaggatagatgtcgctgatgacctgccgcagctgcccgagagtcatattctcctgttgcgcatgctgttcggtcagcgtatcgagcgtcaccgtcgaggtcgcggtcacggcaatggtgcaaaaatagccgtcatcttcatagcgcccaacgcgcagcacatcgccgggcttaaagtgcgactccgctgcatcgcgaatggtgatggttttgcgcccggcgaggatgtcgtcctgaaaacgctgaaaaaaggtaatgtcattggcctgcatgatataattccgtcctggtcattatgaattgtgagttcgccctgtgagtatgttctcccacgccgctgtcgccagtctcaataatcttgagatgatggtctaccactacgtcattaaaaatcgtgacaaagtgatgtacatgaccatccgcgaactggccgaggccgccggggtctccacgaccaccgtgttacgcttctgccgcaaactgcagtgcgagggctactctgaatttcgcgtgcgctttaaattatatctcgagcagaatgagcctcaacaggcaaatatcggcgccagcgaaataatgagcttttttaaaagcgtcaataatgacgagttcgatgaattactcgagcaggccgtcgatattattctcgcctccgaacgtattatttttgtcggcgccggcacctccggcgcgctggcgaaatatggcgcacgcttcttctccaacgtcggtaaattcagcaaccatattgacgacccctattttccggtaaccaacgatatggcccgcaacgcgctggcgatcgtgctttccgtctctggcgagacggaagagatcctgcgctttgccagccagttcagtctgcatcattgcaaggtaatgtcgattaccagccatgagcattcgcggctggccaaactggctgatttcaatctctcctggcacgtgccgcagacgcgcattggcggggtctacgatattacaacgcaaattccagtgatctatattctcgaatccctcggacgtaaattagcgcgcaaaatcagctaaaaataacagcctgtttttttgatgtaacatattacctttggcggaatttgttatatcgtgacattcactttcactttgctagactcgagaacaatagttattagagagattagccaggatgaaaaaattaacccttccgaaagattttttatggggcggcgcggtcgccgcgcatcaggttgaaggcggctgggatcagggcggcaaaggccccagcatctgcgatgtgttgaccggcggggcgcacggcgtgccgcgcgaaatcacccaccaggtcgaagcgggaaaatactacccgaaccacgaagccgtcgacttctacggtcgctacaaagaagacatcaaactgttcgccgagatgggcttcaaatgcttccgcacctctatcgcctggacccgcatcttcccgcagggtgacgaaacccagccgaatgaagagggactgaagttctacgacgacatgttcgacgagctgctgaaatacaacatcgagccggtgatcactctctcccacttcgagatgcccctgcacctggtgcagcagtatggcggctggaccaaccgcaaagtggtcgatttctttgtgcgctttgccgaagtggtcttcgagcgctataagcacaaagtgaaatactggatgacctttaacgagatcaacaaccagcgcaactggcgcgcgccgctgttcggctactgctgctccggggtggtctataccgagcatgacaatccggaagagaccatgtaccaggtgctgcaccaccagttcgtggccagcgcgctggcggtgaaagcggcgcggcgcatcaacccggacatgcaggtcggctgcatgctggcgatggtcgccctctacccttactcctgcaaaccggaagatgtcatgttcgcccaggagtcgatgcgcgagcgctacgtctttaccgacgtccagctgcgcggttactacccgagctatgtgttgaatgaatgggaacgccgcggcttcaacatcaggatggaagacggcgacgcgcagatcctgcgcgaaggtacctgcgcctatctcggcttcagctactacatgaccaacgcggtgaaagccgagggcggcactggcgacgccatttccggtttcgaaggcagcgtgccgaacccgcacgtcaaagcttccgactggggctggcagattgacccggtcggcctgcgctattctctgtgtgaactgtatgagcgttatcagaagccgctgtttatcgtggaaaacggctttggcgcctacgacaaagtagaagccgacggcagcatcaacgatgactaccgcatcgactacctgcgcgcccacatcgaagagatgatcaaagcggtcacttatgacggcgtcgatctgctgggctataccccatggggctgcatcgactgcgtctccttcaccaccgggcagtacagcaaacgctacggcttcatctacgtcaacaaacacgacgatggcaccggcgatatgtcccgctcgcgcaagaagagctttaactggtacaaagaggtcatcgccagcaacggtgagaacctgtaactaaccgccctctcccggccgggggagggctaattgcttatccgccagacacttctttacagctttaccattgccaaaacccgttcgcccgttaagataagcctcgtgaatatttgaggcaatcatgattaagcgacaacgcaaagccattctttttgtcctcctggcctgtctggtagtgctaacctgcaccgcccagcggatggccgggatgcacgcgctggtcatgaacctcaccgccgacagcccgtcgctacagcaaaaccaggatcaggtcgaggcgccggtcacgccgtgcgagctcagcgccaagtcgctgatggccgttccgccgatgctgtttgaaggggcgctgttggctatcaccctgctgctggcggtgctggcggcgatcccgccgcgtatcgaacgccagtggcctccccgcgttatctccccaccccgattgcgggtgcatctgcgattatgcatcttccgtgagtgattgattctcctgacagttcaggttaattcatcacttacggagcaaacttatgtatatggtattcaggcgactactggtctgcctgctttggctatggctgcccgtcagccaggccgccgacagcggctggctgcgcgccgccgacaatcaacacgccagcgtccgcctgcgggcgcaaaccgaaagcaatggcgacactcgcctgcttttagacgtagcgctggaaaagggctggaaaacctactggcgctcgccaggggaaggcggcatcgcgccggctatcgcctggcacacgccgctggaggtgaactggcgctggccgacgccgcagcgcttcgacgtcgcgggcatttccactcagggctatcacggcgacgtcagctttccgatgacgctgcgcgggaagataccgccgacgcttagcggcgtcctgacgctctctacctgcagcaatgtctgtattctcactgactatcccttttcgctggatatgacgactccggcgggggagcgatttaattatgattttacccgcgcgatgggcacactgccgctgcgcgatggcctgacttcgcaactgaccgccagctacgtcagcggcaaactgacggtgaccgcccgccgcgatgccggctggcagcagccagcgctgtttatcgacagcatggaggatgtcgatttcggtaagccgagctttaccagccgcggcgctacgttgaccgccaccgtaccagtcaccgacagctggggcgaagcggcgccggacctgagcggcaaaacgctgtcgctggtgctggccgatagcggtcaggcgcaggaaagccaaatcgccgtcgccgccggcagcgccgcgccggggctggcgttaggctgggtgctgctgatggcgctggccggcgggcttattctcaacgtcatgccctgcgtgctgccggtgctggcgatgaagctcggctcgctggtgcaaaccgaaggtcgcgaacgcggcgcggtgcggcggcagttcctcgcctcggtgtgcgggatcgtcgtctcgttcctggcgctggcgctgatgatgaccgcgctacgcctggggaatcaggcgctcggctggggcatccagttccagaacccgtggtttatcggcgcgatggcgctggtgatggtgctgttcggcgccagtttattggggctgttcgaaatccgcctatcctccagcgccagcactttcctcgccaccaggggcggcaacggcttaatgggccatttctggcagggcgccttcgccaccctgctggcgacgccctgtaccgcgccgttcctcggtaccgccgtgtcggtggcgctggtggcgcccctgccgctgctgtggggcattttcttcgccatggggatcggcatgagcctgccgtggctgctgatcgttgcctggccgggtctggcgcaacgactgccacgcccgggccgctggatgaatcatctgcgggtggtgctggggctaatgatgcttggttcagcgctatggctggtcagcctgctgacgatccacatcggccgtacgccggtgcttaccctgctggtgattctggccatcgccctgctagtggccaccgcctggcgctaccgctggcggacggcgctacgcgcgggcgctctggccatcgtggtggcgggcgccgtcgcctttgtcgcccaacaggacggccagggcccgcgccgcgaccgggttaactggcagccgctcagcgagcaggctatcgccagcgccctggcggagcataagcgggtatttattgatgtcaccgccgactggtgcgtgacctgtaaagccaataaatacaacgtgctgctgcgcgacgacgtccagcaggcgctgttagcgccagacgtagtcgccctgcgcggcgactggagccgcccctccgctgacattagccagtttttaaccgctcgcggcagcgccgcggtgccgtttaaccagatttacggaccggaattgccgcagggacagattctgcctgcgctgttagaccgcgaacaccttctcgccaccctgtccgccgctaaaggaaaataacatgagagctatcaccgccttattactgctgtgcgtatcggccttcagcttcgccgccccggcggaagaaccacaatcgaacggtaatgaccagttagcccagctgctgtttaacgatccgaatagcccgcgcaccggcgcgaaagagccaaaactcacaatcgtctcgtttaccgattacaactgcccttactgcaaacagtttgatccgctgctggaaaaaatcgtccacgataatccggacatccagctcatcgttaagctgctgccgtttaaagggcagagttcggtgaatgccgctaaaaccgcgctctccacctggcgtcagcagcccgataaattctgggcgctgcatcagcggctgatggcgaaaaaaggctatcacgatgacgccagtatcgccgccgcgcagaagaaaaccgccaccgatagtgtaaaaatcgatgacaagaccatggattcgctgaagatgaacctgattttgtcgcaggtgctgaatattcagggcaccccggcgaccatcatcggcgatcagatggtggccggcgcgatccctgctgatgagctggaggggctggtgaaagagcagctggcgaaagcccgtggccagtaaaatcaggcgctggctgcgcgagctggcggtgtggctgctgattggcgcggcggtgagcctggcggtggattattttcgccagcccgcgctgccgcaaaacgtcagcgccacatcgctgcagacactcgacggcaggacgctggatctgcatgccatgagccagcaaaagccgctgctgctgtacgtctgggcgacctggtgcggagtttgtcgctataccacgccgtcggtggcatcgcttgccgcggacagcggcaatgtgctgacggtagccctgcgttccggcgataacgtcacgctggagaagtggctgaccaggaagaaactggcgctgccgacggtgaatgatccaagcggccagctggcgcggcagtgggatatccaggtaacgccaacgctggtggtcatttctcaaggcgaggtaaagtcggttaccaccggctggaccagcggctggggaatgcgcctgcggctgtggctggcctcctggtaggccgccgggctttagcggtttttatgccgggtaaggcgtatccgccacccggcctaccattcggctttgaccccgtagggccggcaagcgcagcgccgccgggcaatagacatctacgggttatttcccgcccgccagttcaaggaagctacccgtcacatacgacgctttgtcgctcagcagccaggcaatggcctgagcgacctcttccggcaggccgccgcgctgcatcggtagcgaacctttcactcgatccacgcgtcccggctcaccgccggaggcgtgcatctcggtataaatcagccccggacgcacgccgttgacccggatcccctgcgccgccacctccagcgccagcccggtggtcagggtatctaccgcccctttcgacgcggcatagtcaacgtactcccccggcgcgccaaggcgcgaggccgccgacgacacgttaactatcgccccgcccttgccgccatgccgatgtgacatacgctttaccgcctcacgacagcagaggaagtaaccggtgacgttggtggccagcacgcggttaatacgctcggcgctcaggctctccaccgtacactgggtaaacaggatcccggcgttgttgaccagcgccgtcagcggctcgcccatgcggtcgatcgcctcaaacatcgccatcacctgcgcttcatcgctgatgtccgcccgcagcgccgtggctttgccgccagacgccacaatggtattcaccacctcggtggcggcgttaatgttgtgatggtaattgaccgccacggtatacccttcctgcgccagcagcagcgccgtcgcccggcctatgccgcggctcgcgccgctaataagagctattcccataccttccctccaaaaaaataaaggcgccgcagcgcctttaaaagtttagctaaaacgcaaacttactggtattcgctcatcggcacgcaggagcagaacaggttgcggtcgccgtagacatcatccagacgtttcaccgtcggccagtacttgttgtgcaacccagccgggaataccgccagctcgcggctgtacggatggttccactcgcccaccagctcgccctgggtgtgcggcgcgttcaccagagggttatcctccaacggccattcgccggctttgacgcggtcgatttccgcgcggatcgccagcatcgcgtcgataaagcggtccagctcgaccttgctttccgattccgtcggctcaaccatcagcgtccccgctaccgggaaagacatggtcggggcatggaagccaaagtcgatcaggcgcttggcgatatccagctcgctaatgccggtctcttctttcagcggacgaatatcgagaatacattcgtgcgctacgcgaccatcgcgaccggtgtagagcaccgggtaggcgtctttcagccgggtagcgatgtagttggcgttaaggatcgcgttctggctcgcctgcttcagcccttccgcgcccatcatgcggatatacatccagctgatcggcaaaatggacgcgctgccgaacggcgcggcggaaaccgcgccctggcgggtcagcataccttcaatctgtaccacgctgtggcccggcacgaacggcgccaggtgcgctttcacgccgattgggcccatgcccgggccgccgccgccgtgcggaatgcagaacgttttatgcaggttgaggtgcgaaacgtcggcgccgataaagcccggagaggtgatcccgacctgggcgttcatgttggcgccgtcgagataaacctggccgccaaactggtgcacgatctcgcacacttcgcgaatggtctcttcatacacgccgtgggtcgacggataggtgaccatgatgcaggagagattggcccccgcctgctctgctttttcacgcagatcggcgagatcgatgttgccgtttttatcacaggcaacgaccactacctgcatacccgccatctgcgcggaagccgggttggtgccgtgcgcggagctagggatcaggcagatatcgcgatggccttcgttgcggctctcgtgataatggcgaatcgccagcagaccagcatattcaccctgcgcgccggagttcggctgcatgcagacggcgtcatagccggtcagtttcaccagccagtcggaaagctgggcgatcatctgctgatacccttccgcctgctcgaccgggcagaacgggtgcagctcggcgaattccggccaggtgatcgggatcatctccgccgcggcgttcagtttcatggtgcaggagcccagcgggatcatcgcctggttcagcgccagatctttacgctccagggcgtgcatgtagcgcatcatctcggtttcgctatggtagcggttaaacaccggatgggtgaggatcgcatcgtcgcgcagcatcgccgccgggatcgaacggctatccagcgccacgtctttatccagggtatcgatatccagaccgtgatcgtcgccgacgatggcgcggaacaggttcagcacatcttcgcgggtggtcgcttcatcgagcgtaatgcccaccgcgccgtgaatatcgctgcgcaggttaatctgcagggcttcggcacgcgccagcaccgcggctttatccgccacttcgacgcacagggtgtcgaagtagtgggcatggcgcagcttcagccctttcttctgcaggccgtcggccagaatgtcggtcagacgatgaatgcggccagcgatacgtttcagacccgccgggccgtggaataccgcgtacaggctggcgatgttggccagcagaacctgcgaggtacaaatgttggagttcgctttctcacggcggatgtgctgctcgcgagtctgcatcgccatgcgcagcgcggtattccccgccgcatctttcgatacgccgataatccggcccggcatggagcgtttgaattcatctttcgccgcgaagaaggctgcgtgcgggccgccgtagcccatcggcacgccgaagcgttgggcggaaccgaagacgatatccgcgccctgcttgcccggcgccgtcagcagcaccagcgccataaagtcggcagcgacgctgacaatcactttgcgcgctttcagctcggcgatcagtttgctgtaatcgtggatttcgccggtggtgcccacctgctgcagcagcacgccgaagacatcctggtgatcgagcactttgtcggcgtcatcgacgatgacgtcgaaaccgaaggtttccgcgcgggtgcgcaccacgtccagggtttgcggatggacgtcggcggcaacgaagaagcggttggcgctcttcagtttactgacgcgtttggccatcgccatcgcttcggcggcggcggtggcttcatcaagcagcgaagcggaagcgatatccaacccggtcagatccagagtgacctgctggaagttgagcagcgactccagacggccctgggatacttccggctggtaaggggtataggcggtataccagcccgggttttccagcatgttgcgctgaatgaccggcggcagctgcacggcggtatagcccatgccgatgtaagacttgaagcgcttgttgcgactggcaatcgccttcagctccgccagcgcggcgaattcggtagtcgcgtcgcccacctgcggtggggtcgccagctggatatcctgcggcacaatctggccgatcagggcgttaagcgaatccgcgccgacggtcttcagcatctcttgctgttgctgagcgtccgggccaatgtgacgttcaataaaggcgtcgcggttttcaagctgacttaaagtctgagtcatgagcgatggttcctgaaacgtgcggtgaatcgtggttgtctgactggtttgcccggcaagcgctgatgcttaccgggccagaatacgcaaaatcattcgcgttgcaggaaggcggcgacacagcgactccccgggagcttacaaaagtaagtgaccggggggagccaggaagccaacgcccctgcagcgtgaaggatgaagcgtatttattcgtcttccagtaaagcttcatacgcggcggcatccagcagcgcggcaacctgcgcttcgtcgctggctttgatcttgaagatccagccgtcagtatacgggtcgctgttgaccagttccggagagtcgttcagctcttcgttgacggcaacgatttcaccgctaatcggcgcgtagatatcggaggccgccttcacggattcggcaaccgcgcaatcggcgcccgcttcaacggtggcgcccacttccggcaggtcaacgaaaaccatatcgccaagcagctcctgcgcgtgctcggtgatccctacggtataggtgccgtccgcttctttacgcagccactcgtgttctttgctgtatttcagttctgctggtacgttgctcatcaattcatctccaaaaaagggaaatcacacaatggctttgccattgcgtacaaaaccaggtttagtcacttttaccggcatttcacggttacggatttgcaccaccgcggtgtcgccaatcccggccggcacgcgagccagcgcgatgctgtagcccagcgtcggcgagaaggtgccgctggtgataatgccttctttttgattaccgtcgctatcggtaaaacggaccggcagaccaccgcgcaggacgcctttctcggtcatcaccaggccaaccagctgctcggtgcctttttcgcgctgcatctccagcgcttcgcggccgatgaagttacgatcggcgggctcccaggcgatagtccagcccatgttcgccgccagcggggaaacgccttcgtccatctcctggccgtacaggttcatcccggcctccaggcgcagggtgtcgcgcgccccaagaccgcacggcttaacgccagcgtccagcagaccgcgccagaaatcagccgcctgctcgttcggcatcgcaatttcataacccgcttcgccggtatagccggtggtggcgataaacaggtcgccggcctgcacgccgaagaacggcttcatgccttccacggcctgacgctgagcgtcggtaaacagcgtcgccgccttcgctttcgcctgggggccctgcaccgcgatcagcgacagatcgtcgcgaacggtaatttcaaggccgtaaggttcagcttgttcggagatccaggcgaggtctttttcgcgggtggcggagttaacaacgaggcggaaataatcttcagaaaggaaatagacaatcaggtcgtcgatgacgccggcggaggcggtcagcatgccggtgtagagcgctttgcctggggtggtgagcttcgccacatcgttggccagcaaatagcgcaagaactcgcggatccggctgccgtggaaatcgacgatggtcatatgcgacacatcgaacatccctgcatcgccgcgcaccgcatggtgctcatcaatctgggacccgtaatgcagcggcatcatccagccatggaaatccaccatgcgcgcgccgcacagcgtgtgttgttcatacaacggagtctgttgagccatcttttcctcatcgaataaaacggaaccagccacgaaattgtcggcgattttgcgccacgaaattcggcatcggcatcgctgacggacgccgacgcaaacgttctctttggcctgaacttaccaccgaacccggcgctaaaccataagctcattcagggcatcacattagcttatggctaaaatccgccgaaaagcctacagagttattgactggaaaaaagcgatttacgccacataaaattaacattaacggcgcgacaattagggaaggtgcgaataagcaggtcatttcttcccaagctgactcgctgattaaaatttcgcggatctgggccgatttttttcccgcaaacacatcgaatcagcctatttaggctattttttccaccatttctggcgttatttccggtttttactgagatctctcccactgacgtatcatttggtccacccgaaacaggttggccagggtgaataacatcgccagttggttatcgtttttcagcagccctttgtatctggctttcacgaagccgaactgccgcttgatgatgcgaaacgggtgctccaccctggcacggatgctggctttcatgtattcgatgttgatggccgttttgttcttgcgcggatgctgcttcaaggtttttaccttgccgggacgctcggcgatcagccagtccacatccacctcggccagctcctcgcgctgtggcgctccttggtagccggcatcggctgagacaaattgctcctctccatgaagcagattacccagctgattgaggtcatgctcgttggccgcggtggtgactaggctgtgggtcaggccactcttggcatcgacaccaatgtgggccttcatgccaaagtgccactgattgcctttcttggtctgatgcatctccggatcgcgttgctgctctttgttcttggtagagctgggtgcctcaatgatggtggcatccaccaaagtgccttgggtcatcatgacgcctgcttcggccagccagcgattgatggtcttgaacaattgacgggccagttgatgctgctcgagcaggtggcggaaattcatgatggtggtgcgatccggcagggcgctatccagggataatcgggcaaacaggcgcatggaggcgatttcgtacagggcatcttccatggcaccgtcgctcaggttgtaccaatgctgcatgcagtgaatacgcagcatggtctccagcggatagggccgtcggccattgcccgccttgggataaaacggctcgatgacttccaccatgttttgccatggcagaatctgctccatgcgggagaggaaaatctcttttcgggtctgacggcgcttagtgctgaattcactatcggcgaaggtgagttgatggctcatgatgtccctctgggatgcgctccggatgaatatgatgatctcatatcaggaacttgttcgcaccttccttaggtaatgatggtgttttatgcgattttacggctctaatttctttaacaaaaaaaaggacgcattaataaatctaatgcgaaaaaagaggtgaaattagaatatttcaaatgagggggaaaacccggcgcccaggccgggtgaaagaagtgtgacgcggttaacgtaaccaggcaggcagatcgttgaggcccatcgcctggcgaatcagctgcggtttcacgccaggcagcgtatcggccagtttgagtcccacatcgcgaagaaatttcttcgccggatggctcccggagaacatttcgcggaagccctgcatgcccgccagcatcagcgccgcgctgtgcttgcggctgcgctcgtagcggcgcagataaagatgctggccgatatctttgccctgagcgtgcaggcgcttcagctcgtcaataagctcggcggcatccataaaaccgaggttgaccccctgcccggccagcggatggatggtatgcgcggcatcgccgaccagcgccagccggtgggcggcaaactgacgggcatagcggccggtcagcgggaaaacttcacgttcacttgccagctggcagaggccaaggcgattatcgaacgcgatattcagcgcctggttgaaggtggtttcatcagcctgctgcatccgctgcgcttcccccggcgatagcgaccagacgatcgagcacaggtgcggatcgctgagcggcaggaaggcgaggatcccgtcgccatggaacgcctggcgggccaccgcctgatgcggctcagcggtacggatggtcgccaccagcgcatgatgatggtaatcccagaaggtcagcggaatatcggctttattgcgcagccatgaattggcaccatcggcgccgatcaccagccgcgcggtcagcatgctgccgtcctgcaggctgagaaaggcttcattctcgccccacgccacctgctgaagttccgccggagccagcagggtaacgtcagcgcaacgctgcgccttctgccacaatgcatgatgcactacggcattttcgataatatagccaaggtggctaaagcccatgctctggtcatcgaagctaatgtggccaaagctgtctttatcccatacttccataccgtgatagcagctggcccgctgggcgacgatctcgcgccagacgtccagcttcgtcagcagcttttcgctggcggcattaattgccgaaacgcgcagcgccggcggcgcatcggcggccagcggtcgcggctctgctttctccagcactgcgacgcgcaggccgctaccctgtagaccgcaggctaccgccagccccaccattccaccgccaacaatggcaacatcaacactttgcacgttctactccttaacggggaacccaaccgagggtacgctgcgccagcgcatcgcgcgccggggtaaataattccatcgccatcagaccgacgttgcgccccgccaccagcggcgcccaacggttggcaaacagatgcaccagcccatcggtcacgccgatggtggcggctttatcccctgccctgcgcgcctgatagcggcacagcagcggataatgaccgacatcttcgccgctgagatgggcgtcagcgagtaattccgccaggctcatcacatcgcgcaggccgagattaaagccctgcccggcgatcgggtgcagcgtctgcgccgcattgccgaccagcgccaggcggtgcgacaccgcgcggctggcggtggtgagggccagcggatagacgctgcgtttcccggcgtgggtaatacgccccagccgccagccgaacgcctgctgcagctcctgacaaaagcgttcgtcagaccagctctgcacctcatcgcggcgcgactgcggatgacaccacaccagcgagcagcgcccttgcgacatcggcagcatcgccagcgggccatgctcggtaaagcgctcgaaggcgcgaccttcgtggggcaacgcggtgctgacgttagcaatgatcgctatctgctcatacggctgctgctgccagctgatgccgcagcgggcgcccagtgccgaacgggaaccgtccgccgccaccagcagcttaccgttaatgatttcgccgccctcaagcgtaaggctgacgctctcctggctgcgactgaccgcttccactttcgccggacagtgcagcgtgacgcccggcgcctcgcgcagcagaccaaacagccgctggccgacatcgtggagttcaaccacctggcccagcgccgacaggccataatccgcggccgccagattcacaaacccggcatgaccgcggtcgctgacgtgtactcgctggatgggcgtcgcgcgttcggcgaggcgttgccagataccgatacgcgccagctgctggcaggtgcccgcagccagggcgatcgcccggtcgtcaaagccagggtggcgtgaagaatgcggatcctgcgcttcaatgaggtggaccggcagcgcgccgccagtcaaacgggagatggccagcgcgagcgtcgcgccggtcatcccgcccccgacgatcagcacgctcatgactggcgcgccgccgccatcagcgcctcgatctcatccgccttcttcaccacgccggcggtgagattttcgttaccgtcttcggtaatcacgatgtcatcttcaatacggatgccgatgccgcgatactgcgccggcacgtcggcatcggtggcgatatacagtcctggctcgacggtcagcaccattcccggctccaggacgcgcgaacggtcggtgtcgtaattaccgacatcgtgcacatccagacccagccagtggctcaggccatgcataaagtacgggcggtgggcgttgttggcgataagctcgtcaatctcgcctttcaggatccccagccgcaccaggccggtaatcataatgcgcaccacttcctggttgacctgacagatcgaggtgcccggccgatagagtttcagcgcggtctccagcgattcgagcacaatgtcgtagatctcgcgctgcggctgggtaaatttaccgtttaccgggaaggtgcgggtaatgtccccggcatagccgcgatactcgcagccggcgtcaatcaggactaaatcgccgtcgcgcagttcagattcgttttcggtgtagtgcagaatacagccgttttcgccgccgccaacgatggtgttataggaggggaaacgtgccccgtggcggttgaattcatggagaatttcaccttccagctgatattcgaacatgccagggcggcatttttccatcgcccgggtatgggccagcgcggtgatctccccggcgcggcgcatcacggcaagctcttccgcggatttaaacaggcgcatctcatgcacaatgggccgccagtcgataaccgagttcggcgcctgcagattctggcgcgagcctttgcgcagtttttcgagggcgttgaacacaatctcatcggcataggcatattcaccctgggcgaagtagatcgcgtccagaccgttgagcagctgatacagctgctggttgatttcgctgaacgccagcgcccggtcgacgccaagcttcgccggcgcggcctcctggcccagacggcgtccaaaccagatctcagcggtcagatcgcgaacccggttgaacagcacgctatggttgtgggtttcatcgcttttaatcaacaccagcagcgcttccggttcgttaaagccggtgaagtaccagaaatcgctgttctgccggtagggatattccgaatctgcactgcgcaccgcttccggtgcggcgaaaatcagcgccgcgctgcctggctgcatctgcgccaacagcgtctggcgacgcgatagaaattcctgctgagtcatgacgccccctgaacgaattttagttagtgtaatgtcggtttgcggacttccggtgcggttggctgctgacgggcaaaggtgtcgtggcacagcagtgcggcaacgcggacatactcgataatctcctccagagacatctccagctcttcctgatcttcgtcttcatcgtagcccagctgggcaatattacgcagatcgtcaatcgcttccccggtttcatccttcactttatccagcttcggctggctaacgccaagaccaagcaggaagtggttgacccaaccggcgagggcgtcggcacggtcaaagacgctcaccgcatcgccttccggcagatacagttgaaagaggaaaccgtcgtcatccagtgaatcgctgatggcggaatgcatgttacgcagcgcctgagccagttcatggccaaaggcgagaccttcgttggtcaggtcgtgcaccagcggctgccagctgctgtccgtgttgccgccgcacagcaatccgctgatcaaaccgtgcatttcggccggggtgaggcctaccccttgttggttcagtaactggtctacatcgttgtaaccaggcatttcgttctgtatagacatgcgcattcgtcatcgttgggaggaatattcatggtatgctaccactttggaccctggtgaaccagaatagggcttgtatcttcgcaccagggtagctatagtgtcgccccttcgcagacccgggccagggtgtgaaggcagcgcagtcaatcagcaggaaggtggcatgtctgcacaacccgtagatctccaaattttcggccgttcactgcgagtgaattgcccgcctgaacaaagggatgccctgaatcaggcagctgaagaccttaatcagcggttgcaagatttaaaagaacgcactagagtcacaaatactgagcagctggtcttcatcgcggcgttgaacatcagctatgagttgactcaggaaaaagcgaagacccgcgactacgcttccagcatggagcagcgcattcgcatgcttcagcagaccatcgaacaagcattgcttgagcaaggtcgcataagcgaaaagccagggtcgaagtttgaataacactttgcagttaactgtgttagagtaatcgcaagaacaaaatttctctgagatgtttgcaagcgggccagtcccctgagccgatatttcataccacaagaatgtggcgctccacggttggtgagcatgctcggttcgtccgagaagccttaaaaccgtgacgacacattcaccttgaaccaagggttcaagggttacagcctgcggcggcatctcggagattcccttctttacttcgcatcatcccccatacgtgttttcggctgaagccgccctgtattacacttgctcctattgtttcgccagctcgtaacgagacctgcatgactatacagcccgataccctgctctcccgtcagcatattcgccagcagatccgcgatcgtcgacgcgcactcagcccggagcaacagcgcctgtttgcccaacaggccgccgagcggatgatggcctggccgccggtagttctcgcccacaacgtggcgctgtttctctcctttgacggcgagctggacacccagccgctgatcgaccagctctggcgcgccggcaagcgggtatatctcccggtgctgcatccctttagccccggcaatctgctgtttttacactaccatccgcagagccaactgatcgtgaatcgcctgaagatccgcgaaccgaagctcgatgtgcgggatgtgctgccgctggctgaactcgatgtgctggtgaccccgctggtggccttcgatgtcagtggccaacggctgggaatgggcggcggtttttacgaccggacgctgcaaaactggcagcagtatcgcctgcagccggtgggctacgcgcacgactgccagcaggtggatagcctgccgagcgaagagtgggatatcccgctgccggcggtcatcaccccgggaaaaacctggtgttggtaggtacgcggggacgagaaattcagcctggaaagtattaacaaaaaaacgggcaggtacgcgacctgcccgagaggcaaaaatgattagaacagcagacgggcgcggatagtccccgggatcgctttcattgcctgcagcgcctgctgggcaacatcttcctccgcttcaatatcaatcaccacgtagcccatctgcggcgacgtttgcagatactgggcagcaatgttgatgctctgcgcggcgaagatttggttgattgcggtcaggacgcccggtcggttctcatggatatgcagcagacggcggccgccgtgcagcggtagagaaacttccgggaagttaactgccgacagggttgacccgttgtcagagtatttcgccagcttgccagctacttccagaccgatgttctcctgcgcttcctgagtggagccaccgatatgcggtgtgaggatcacgttatcaaactcgcacagcggcgaagtgaaggggtcgctgttggtcgcaggttcagtcgggaagacgtcgatagccgccccggccagatgcttactggccagcgcatcgcatagcgccggaatgtccaccacggtaccgcgggaggcgttgatcagcagcgcgcccggcttcatcagcgccagttcttccgcgcccatcatatttttggtagaggcgttttccggcacgtgcaggctgaccacatcgctcatgttcagcaggtcggagagatgctgtacctgagtggcgttgccgagcggcagtttgttttcaatatcatagaagaagacgtgcattcccagcgattccgccagaatgccaagctgggtaccgatgtggccgtaaccgatgatgcccagctttttaccacgcgcttcgaagctgccgaccgcctgcttgttccacaccccgcggtgcgctttggcgttggcttccggcacgccgcgcagcatcagcagcagttcgccgatcaccaactcggccaccgagcgggtgttagagaacggcgcgttaaacaccggaataccgcgcttcgcagcggcgttcagatcgacctggttggtcccgatgcagaagcaaccgacggcaaccagtttttccgctgcggcgaaaatctcttcagtcagatgggtacgggaacgcaggccgatgaaatgggcatcacggatcgacgctttcagctgttctgaatccagcgcgcctttatgaaattcaatgttggtgtaacccgctgcgcgaaggctatcgattgccttttgatgcacaccttcaaccagcagaaatttaatcttgtctttttccagtgataccttagccatttccccgtcctgttttgtcttaactgatgtcgtgctgaacgaaagttcgtctcagcaacatatcaaaaaaaactatcgcggcaatatgaacgtttgcgtcgccgtcctgaagaaatgtcatccagagggaaatcgcaggacaaaacaccagaaagagaagaaatggtagcgtgtaaatcagaatggttgcataaatgtgacagaagtcaccaaattgcacctggtgaaaaaatatttgcgagggagccggtcggctccctgcggacagactattttacgatggtcttcacgccgtcggcagtaccaatcagcgccacgtcggcgccacggttggcgaacagccccacggtgacaacgccaggaataccgttgatcgcgttttccagcgcgatcgcatcgagaatttccaggccgtgcacgtcaaggatcacgttgccgttatcggtcaccacgccctgacggtactctggacggccgcccagcttgaccagctgacgcgccacggcgctgcgcgccatcggaatgacttccaccggcagcgggaacttgcccagaatatcgacctgcttggaggcgtcggcgatgcagataaatttatccgcgaccgaggcgatgatcttttcacgggtcagcgccgcgccgccgcctttgatcatctgcatatggccgttgatctcatccgcgccgtcaacatagatccccaggcgatcgacgctgttaagatcgaagacggtgatcccgaggcttttcagcttctcggtggaggcgtcggagctggaaaccgccccttcgatctgccccttcatggtgcccagcgcgtcaataaaatgggccgccgtcgagccggtgcctacgccgacaatagtccctggctgtacatattgcagtgctgcccaacctaccgcttttttcagttcatcctgcgtcataattctggtccgagatgtgaatgcctgtggcgcattatagaacatcgatagtggaaatgtccctgcgatgcagatcacacaactgaacagaccaatttcgtctgtatcaaataaaaatttatgtcatagtgcgagataacgattagttatgggggcacgccagaataatgaaacgaccggactacaggacactacaagcgctggatgcggtgattagggaacgaggatttgagcgcgccgcgcagaagctatgtattacccagtccgccgtctcacagcgtattaagcagctggaaaatatgttcggccagccgctgctggtgcgtaccgtgccgccgcgccccaccgagcaaggacagaaactgctggctctgttgcgccaggttgaactgctggaggaagagtggctgggcgatgaacaaaccggctcgacgccgctgctgctgtcgctggcggtgaacgccgacagtctggcgacctggctgctgccggcgctggccaacgttctgtcagactcccctattcgtctcaacctgcaggtggaagatgaaacccgcacccaggagcgcctgcgccgtggcgaagtagtgggcgcagtgagtatccagccgcaggcgctgccaagctgcctggtggatcagctgggggcgctcgattacctgtttgtcgcatcaaaagagtttgcgcaacgctatttcccgaatggcgtgacgcgttcggcgctgcttaaggcgccagtcgtcgccttcgaccatctggacgatatgcatcaggcgttcctgcagcaaaacttcgacctgccgccgggcagcgtcccctgccacatcgtcaactcgtcggaagctttcgtgcagctggcgcgccagggcaccacctgctgtatgatcccgcatctgcagatcgaaaaagagctcaacagcggcgaacttatcgatctcaccccgggcctgttccagcgccgcatgctctactggcaccgcttcgccccggaaagccgcatgatgcgccgggtgaccgatgcgctcattgactacggacacaaggtgctgcgtcaggattaaaccgcgggcataaaaaagccacttcgctgaagtggcttttttgtttctatcgcttactgggccggtttcggcgtttccgccggtttcgccggggtggctggagcagcggcttgcgccggctgcagctcaaagactacatcgacctggtcgtcaaactggatagtcgcctgctcgtaggtttcctgggcagaaaccggcgcagcgtcagcagccttcatcatgcgaaccatcgggctcggctgatagttggagacatggtagcgcacgctgtacaccggacccagcttgctgtggaagcctgcggccagctcctgcgcctgatgcacggcgtcgtcgatcgccgctttacgcgctttatctttgtaggcgtccggttgcgcaacgcccagcgagacggagcgaatctcgttgagacccgctttcagggcgccatccagcagaccgttgagtttatccagctggcgcaaggtcacttccactgtgcgcaccgcgcgatagcctttcagaatgcttttcccgttctgatagtcgtaatcaggctgggtacgcagattcgccgagttgatgtcctttttagcaataccgctcttttcgaggaaagagagatattgcgcaacgcgatcgtcagcctgtttttttgccgacgcggcgtcttttgccgacacgttcacttcgatcgccagggtggcgatgtccggaaccgcggcaacgcttgctgtgcctgaagtcacaatgtgcgggccatccggcaattcgctggcctgtgccgccatcgtggtcaatccgagtgttgccgccagggctaagacttttaacttcactgtcgtttctccatgttacttaaatcgcccttacgggacgcatgccagcaagcttagcgcgtacagcaggaaagtccatcggacaacgcttagttaagcaacgcctggatatggctgacgccttctcttgccagctgaaacgcaataaaccacatgacggcgccgaccacaatattgatgatccgctgggctctggcggtacgcagtcgcggcgccagccaggcggctaacagcgccaggccaaagaaccacaggaaagaggcgctaatggtccctagcgcaaaccagcgcttcggctccaccgccagctgacctcccagactgcctaacaccacaaaggtgtccagataaacgtgcgggttaagccaggtcaccgccagcatggtgataatgattttccagcgcccctgctgcattacctctgcattggcgagttcaagactctgactgaacgccgttttcaatgcgccgaagccataccacagcaaaaaggccacgccgccccaggtcactagcgccagcagccacggggattgcatcagcagtgcgctaccgccgaaaatgccagcgcagattaacagcaagtcgctgaccgcgcatagcagggcaatcatcagatgatactgacgacggatcccctgatttatcacaaaggcattttgtgggccaagcggcaatatcatagccgctcccagggcaagcccctgaaagtaataagtaaacataaggatttatccgctgagttcgagagtggcgctgactatagcgtgaatgaattattagcggaaatttaaataattaatcattaattagaacaactaatgatgagctattgaaaaaggccggcatggccggcctgagttattgagaggcggtttactctgctttttccggcaggcgcaccacatgaacatccatctgcgggtaagggaagctgatgccgttggcgtcaaattcacgcttgatacgctcgaggatatcccagtagacgttttgcagatcgctgcttttgctccacacgcgcaccacgaagttcaccgacgaggcgccgagttcgttcagacgaacggtcatttcccgatcgcgcagaattcgatcgtcagattcgataatcgaggtcagcagctgctttaccttgtcgatatcagcatcgtaagcgacgccgataataaactcattgcgacgcgcaggctcccgggagaagttaatgatattgccggcgatgattttcccgttcgggaccaccactaccttaccgtccgcggtacgcagggtggtggagaaaatctgcacgttcaacaccgtacctgccacgccgccaaggtcgacatactcgccagcgcggaacgggcggaacatcaccagcagtacgcctgcggcaaggttcgacagcgatccctgcagcgctaaacccaccgccaaaccggcagcacccagcaccgcaatcaccgaggcggtctgcacgcctacccgccccagggcggcaatcagcgtaaaggcgataaccgcatagcgcaccagcgcagagagaaaatcggccacggtagcgtcaattttacgcgccagcatcaggcggttgacggtattagagacgacgcgcgccacgatcatcccgacgatcaggatagcgatagccgcgacgatgttgacggcatagctcagcagcagctcctgattgcgtgccagccacgtcccggcgtggttgatgctatcgacaacgttcaaatcttccatttaacattccttatgaatcccctgggggaaagtaaataactcagcctgcgacagggcagtcaggttatagggtaaacaataagtgcacgttttgccaaatggatcacagttttctgccacgctatcctgttgttaagataataaaaaagcccgcattgctgcgggcttccaggtaagaaacagatttttcttacagaacgtcgatcgcgttcagctctttaaatgcctgctccagacgagtcaccatggaagtctgggcagcacgcagccatacgcgcgggtcgtagtatttcttgttcggctggtcttcgcctttcgggttgcccagctggccctgcaggtaagcttcgttcgctttgtaatactgcaggataccgtcccaggttgcccattgggtgtcggtatcaatgttcattttcaccacgccgtagctgacggagtctttgatttcctgagcggaagaaccggaaccgccgtggaacacgaagttcaggctgttgtgcggcaggttgtgtttcttggaaacatattcctgagagtcgcgcaggatggtcggggtcagaactacgttacctggtttgtacacgccgtgtacgttaccgaaggaagcggcgatggtgaaacgcgggctgattttgctcagctcggtgtaggcgtaatccacgtcttccggctgggtgtacagggcggaagcgtccatgtggctgttatccacgccgtcttcttcaccgccggtgcagcccagttcgatttccagggtcatgcccattttggacatgcgagccaggtacttggagcagatctcgatgttttcgtgcagggactcttcagacaggtcgatcatgtgggaagagaacagcggtttgccagtagcggcgaagtgtttttcaccggcgtccagcaggccgtcgatccacggcagcagtttcttcgcgcagtggtcagtgtgcaggataaccggcacgccgtagtgttcagccatctggtgcacgtggtgggcgccagagatagcgccgaggatagcagcaccctgaggaacgtcagttttcacgcctttacctgcgatgaacgctgcgccgccgttagagaactgaacgataaccggagagcgaactttcgctgcagcttccagaacggcgttgatggaatcagtacctacgcagtttaccgccggcagtgcaaagttgttttctttcgctacctggaacactttctgaacgtcgtcgccagtgatgacgcccggttttacgaaatcaaaaattttagacatgttacttagtcctgtatctgtatcttcgaccgttgaagaaggttcgcgagcccttaagcgcgctgaaaaacaggcgggtttccccgcctgaactgaattactgcttagcgcgctcttcgagcatcgctactgccggcaggactttgccttcgacgaattcaaggaatgcgccgccgccagtggagatgtaggaaattttgtcagcgatgccgaacaggtcgatcgctgccagggtgtcaccgccgccggcgatggagaaaccttcgctgtccgcgatagcgttagccacgatttcagtccctttacggaagttagggaattcgaatacgccaaccgggccgttccacaggatggttttggcgttcttcaggatttcagccagtttctgtgcggaaacgtcgccaaggtccagaatctgctcgtcatctttgatgtcgttaacagacttcagggttgccgttgcggtttcggagaactcggtcgctacgcgaacgtcggtcggaaccgggatatcgcaggtgcccagcaggcgcttggcttcatcaaccagatctgcttcgtacagggatttaccgacgttgtggccctgagcggcaacgaaggtgttagcgataccgccgcccacgatcagctggtcagcgattttagacagggaatccagaacggtcagtttggtggacactttagaaccaccaacgatagcgaccatcggacgagctggctctttcagcgctttacccagcgcgtccagttcagcggccagcagcgggcctgcgcacgccacgtcagcaaatttgccgatgccgtgggtggaagcctgcgcgcggtgcgcagtaccgaaagcgtccatcacgaacacgtcgcacagcgcagcgtatttcttagacagttcttcgtcgtcttttttctcgcctttgttgaagcgaacgttttccagcaccaccagttcaccggcagccacttccacgccgtccaggtagtctttaaccaggcgtaccgggttggacagtttgtctttcaggtaattaacaaccggcagcagagagaattcttcgttgtactcgccttcggtcggacgacccaggtgagaagtaaccatgactttcgcgccctgcttcagcgccagttcaatggtcggcagagatgcacggatacgtgcgtcgctggttactttcccgtctttaactggtacgttcagatccgcacggataaaaacgcgtttaccagccagatccagatcggtcatcttaattacagacatggtgaatcctctcgttgattcataaagttttgtcgacgtttacgcgtcgaacctgaaaccaatagccgccatcgctaacgtcgtgtcgagcattcggttagcaaagccccattcgttatcgcaccagaccagcgttttgatcagatgcgcgccactgacccgggtttgcgtaccatcgacgatggcgctgtgcggatcgtggttaaaatctgtcgagaccaacggtaattccgtatagtcaactataccatgaaatgcaccttgtgctgctttttgcagcaactggttgacttcacatgcttttaccggttttttcaccgtcacgctcaggtcaattgccgtcacgttaatcgtcggcacccgcacggcaatcgcttcaaaacggtcgttaaattgcggaaaaatacgggtgatccctgccgccagtttggtatccaccggaatgatcgactggctggccgcgcgggtacgccgcagatccggatgataagcgtcaatcacctgctggtcatgcatcgccgagtgaatggtggtgacggtgccggactcaatgccataggcgtcatcgagcagtttaatgatcggaataatgcagttggtggtgcaggaggcgttggagacaatgcgatgcccggcgcgaagttcatcctgatttacgccgtacaccaccgtcgcgtcgaggtcgttgccgccggggtgggaaaagagcacttttttcgcccccgcctgaagatgggcttcaccgtgttcacgactcccgtatacgccggtacagtcaagcacgacgtccaccgccagttcgcgccagggcaacgccgcaatggtcggctcatgcagcagacggatggcatcgtcgccaacaaacagctgctcgcgctcctgacggacatcccaggcgaaacggccatggctggtgtcatatttcaataaatgcgcgatgcccgcggcatccgccagctcattgattgccaccacggtgatttccgcacgacgcccggattcatatagagcacgaaccacgttgcgtccaatgcgaccgaagccattaatcgcgatgcgaatggtcatagatctcctgcaaggctgtccctgttatgaggtggctgacagagtaatccagcaacgctctgaggggaaccttaccagctgcaaactgcgactgattgattaattgtcgaacatttaaacgactgaaacgcttcagctagaataagcgaaatgaggaataaaaggaatgtttgtccagcgcaataaaccagctatatgactcacatcacatttttgctggaataatttacaaccgtattacatggttcaggaatagcagatacaaaaaagccgggtggcgagataaaagcaaaacggtaacccaggggttaccgtttttggtgttggcaccctctcctgtgggagagggttggggtgagggcatcagcccgcaccgtaccagcgattacagcagcgctttcgctttagcaaccacgttatcaacggtgaagccgaactcctcgaacagctgctcagccggcgcagactcaccgaaggtggtcatgccaacgatagcgccgttcaggccaacgtatttgaaccagtagtcagcgatacccgcttccacggcaacgcgcgcggtcacgtctttcggcagtacggattcgcgataagccgcatcctgcttgtcgaacgcgtcggtggacggcatggaaaccacgcgcgccttcacgccttcggcagtcagtttgtcccatgcggcaaccgccagctccacttctgaaccggtggcgatgaagatcagctccggctggccggcgcaatctttcagcacataaccgccgcgggccacgttcgccagctgctctgcggtacgctcctgctgcgccaggttctgacgggagaggatcagcgcggtcgggccgtcctgacgctccacgccatatttccacgcaatcgcggattcaacctggtcacacggacgccaggtggacatgttcggggtcacgcgcagggaagccacctgctctaccggctggtgagtcgggccgtcttcgcccagaccgatcgagtcgtgggtgtagaccatcacctgacgctgtttcatcagcgcggccatacgtaccgcgttacgcgcgtattccacgaacatcaggaaggtggaggtgtacggcaggaagccgccgtgcagcgcgataccgttggcgatagcggtcataccgaactcgcgcacgccgtagtggatgtagttcccggcagcgtcttcgttgatcggcttagagccagaccacagggtcaggttggacggcgcgagatctgcggagccgccgaggaattccggcagcagcgggccgaaagcttcgatggcgttctgcgaggctttacggctggcgattttcgccgggttggcctgcagcttcgcgatgaactcgttagctttcgcgtcgaagtcagacggcatctcgcctttcatacggcgggtgaattcggctgcttcctgcgggaaggctttggcgtaagccgcaaacttctcgttccatgcggcttctttcgcctggccggcttctttggcatcccactgggcatagatgtcagacgggatgtcaaacggcgcgtgtttccagcccagcgcttcgcgggtcagggcgatttcggcgtcgcccagcggcgcgccgtgggagtcgtgggtgccggctttgttcggcgaaccgaaaccgatgatggtcttgcacatcagcagggacggtttgtcggtgaccgcccgcgcttcttctaccgcgcgtttgatggcgtcagcgtcgtgaccgtccacgccgcgcaccacgtgccagccgtaggcttcaaagcgtttcgcggtgtcatcggtgaaccagccttcaacgtggccgtcgatagagatgccgttgtcatcatagaacgccaccagtttacccagtttcagggtaccggccagggagcacacttcgtgagaaatgccttccatcatgcagccgtcgcccatgaaggcgtaggtgtagtggtcgacgatatcgtgtcccggacggttgaactgcgccgccagggttttctcggcgatagccatcccgaccgcgttagcgataccctggcccagcggaccggtggtggtttccacgcctgcggtgtagccgacttccgggtgacccggggttttggagtgcagctggcggaagtttttcagctcttcaatcggcagatcgtagccagtgaggtgcagcaggctgtaaatcagcatcgaaccatggccatttgacaacacaaaacggtcacggtcagcccaggccggattgttcgggttatggttcaggaaatcacgccacagcacttcggcaatgtcagccatacccatcggggcccccgggtggccggatttggctttctgtacagcgtccatgctcagcgcacgaatagcgttagcaagctctttacgtgaggacattttgactccagttcggactgttgaaggccatgcccttaacgacttgacgagagcgcgttttgggctacgccggaaaaaagtgtgaacaatgtaacccaagcgacaagtcatgtacatggagcatccttttgccctttaagaaatctctggaacaggttgtgctacgccggaatccgctcgcccgcatcctgcgatactctttataatttacgcagaatacggttccctgccgtcgccgtattttcggataaacaaccataagattgtggaagataaaaatgaaaattcgctcaaccgtacttgctcttgggatcgcagcaaccctcaccggatgtcagaacatggactccaacggtctgctcagctcaggcgccgaagccttccaggcatactctctcagcgacgcgcaggtgaaaaccttaagcgaccaggcctgtaaagagatggacgccaaagcgaaaatcgccccggccaacagtgaatacagccagcggctgaacaaaatcgcggctgcgctgggcgataacatcaatggtcagcccgtgaactacaaggtctatgagaccaaggatgtcaacgccttcgccatggccaacggctgcatccgcgtctacagcgggctgatggatctgatgaacgataatgaagtcgaggcggtgatcggccacgaaatgggccacgtcgcgctgggccacgtgaagaaaggcatgcaggtcgccctgggtaccaacgctgtgcgtgcggcggcggcctccgcgggcggtatcgtcggtagcctgtcgcagtctcagttgggcgatctgggcgaaaaactggtgaactcgcagttctcccagcgtcaggaatcggaagcggatgactactcttacgacctgctgcgtaagcgcggtatcaatccgtcgggactggccaccagcttcgagaaactggccaagctggaagccggccgtcagagctctatgtttgacgatcacccggcatcggaagcccgcgcgcagcatattcgcgatcgcatgaaggccgacggcattaaataagcgacagcgggaggcattattgcctcccttttttatatatccgtaaaaatatttagccgcattaattgataatttaagcgcacaaaccgttaaggaaggtgcgaacaagttcctgatatgagatcatcatattcatccggagcgcatcccagagggacatcatgagccatcaactcaccttcgccgatagtgaattcagcactaagcgccgtcagacccgaaaagagattttcctctcccgcatggagcagattctgccatggcaaaacatggtggaagtcatcgagccgttttatcccaaggcgggcaatggccgacggccctatccgctggagaccatgctgcgtattcactgcatgcagcattggtacaacctgagcgacggtgccatggaagatgccctgtacgaaatcgcctccatgcgcctgtttgcccgattatccctggatagcgccctgccggatcgcaccaccatcatgaatttccgccacctgctcgagcagcatcaactggcccgtcaattgttcaagaccatcaatcgctggctggccgaagcaggcgtcatgatgacccaaggcactttggtggatgccaccatcattgaggcacccagctctaccaagaacaaagagcagcaacgcgatccggagatgcatcagaccaagaaaggcaatcagtggcactttggcatgaaggcccacattggtgtcgatgccaagagtggcctgacccacagcctagtcaccaccgcggccaacgagcatgacctcaatcagctgggtaatctgcttcatggagaggagcaatttgtctcagccgatgccggctaccaaggagcgccacagcgcgaggagctggccgaggtggatgtggactggctgatcgccgagcgtcccggcaaggtaaaaaccttgaagcagcatccgcgcaagaacaaaacggccatcaacatcgaatacatgaaagccagcatccgtgccagggtggagcacccgtttcgcatcatcaagcggcagttcggcttcgtgaaagccagatacaaagggctgctgaaaaacgataaccaactggcgatgttattcaccctggccaacctgtttcgggtggaccaaatgatacgtcagtgggagagatctcagtaaaaaccggaaataacgccagaaatggtggaaaaaatagcctaaataggctgattcgatgtgtttgcgggaaaaaaatcggcccagatccgcgaaattttaatcagcgagtcagcttgggaagaaatgacctgcttattcgcaccttccttggcattattgccgccgcgccggctttcgccagccaacaatctaccagtcagggctttattgaagacagccacctggatctctttttacgtaacgcttatatcaaacgcgattatcgcgatggtttgccggataaagccgaatggggtcagggtatcatcgcgaccttcgagtccggctttactcaagggccggtcggcttcggcgttgacggcattgcgcagtacgccgtgcgcctcgacggcggccgcggccgcagcggcgcgggcggtatcgactttttcgcccaggatgatgatggccgcgcaaagtccgatttagcaaaatttggcgctaccgctaaaatgcgcttctcgaataccgtcctcagctacggtagccagcgcccgatgctgcctatcgtctacgccgatgactcgcggctgctgtacgagagctataccggtaccatgctgacctcaagagaaatcgacggtctggaaattaacgccggttatctcaccgatcagcagcgcaaaagcgacgacagccacaatagcggcctgaagagcctgacctttggcggcgccagctatcaattcaacgaccagcttagcggcgcgctttacgcttcgcacgtcgaagacgtgctgaataagcagtatctcggcctgaactacaagcagccgttcgccaccgaccagcagctgattgttgacttcaacggctataactcgcgcttaaatcaagaatatgccgacgccaatggcaccgggcgcagcaacagcatctggagccttgccgccagctatatctgggatattcacacctttaaggtcgcttaccagcaaagcagcggcagcaccggctaccattatggcggctaccagaaccagggcggcgtcggcgatggcggcaacaccatctggctggctaactcctactggtcagattttaacggcgaggatgaacgttcctggcaggcctcctatggcctggattttgccggactgggcgtaccgggcctgagctggaccaccgcctacgttcgcggggataacattaaaaccgccgagaccagcaacggtaaagaacacgaatggttcaaccaggtgcagtaccaggtgcaaaacggcatggcgaaagatttgaaattgagactccgctattcggtgctgcgcgtttccagcaacgccagcgactataacgtcagcgggaatgaagtgcggttctacgtcgaatatccgtttgacgtgttttaaccatataatgaaccctctccagtgagccggccctctcccggcgcgcaggagcaaccgtccggcgccttgattaaccccctgtgccgtgcggtaccctctccccggaagggagagggttggggtcactgggttatcattaatacagcgtcttctgcggcgggccggcaaagcgcagcgcgccaatctggcccatcttcacttccaccaccgatggccccggcatcgccagcgcttcggtcatcaccgcctggaaatcctcagcccgatccacgctccacgcctgcagacccatcgcctgcgccagcagggaaaagtctggcgtgtgcagctcgttgtaatactggcggccgccaaaatacttatcctgaataccacgcattacgccgtagccgccgtcattcataatcaacagcgtcacattggccttctcctgcgccagggtcgccagttcgccaaggttgaggctcaggccgccgtcgccgaccaggccgaccactttacgttgcggattggcaatcgcggtacccaccgccatcggtagccccataccgatggctccggccagagaatggatattcatcagcgggccgtgagcgcggaacagacggctgccccacaggctgccagaaacggtaatatcgcgcaccaggatgccgtcatcgggcagcgcctgcgcaatcgcgtcattcaatttagcgtaatcgccgcactggtcgcgcagcccctgctccgccgcctctaccgcctctttaagttggctatcccaacgcgcatcgccccatatccggccctgcacccgctctgccagcgccgctaatagcgcccggcaatccgccaccagggtattgtccatcaagtagttacggctggccgccgccgggtcaatatcaatctgcacccgcggcgtgggcagttccagcgtccacgagcgcgtttcgttgctgcgcagccgggaaccggcaacaagtgtgaaatcacattgtgaaatcagcgcttcaaccgagggagaattatgaaacgcgcgcaggctggcgcgatggctgtccgccagaatgccgcggccgtgggtactggaaatcaccgtcaccccggcatccgccagcgtcttcaccgcctcgccgctctctaacgcgccgccgccaagccacagcagcggctgcttcgcctgcttaagctgcgcccacagcgcatcgaccagcgacgcttccggctcaaccgccggagcgcgtttcagcggcgcggtcagcagtgaaagcggaattttggcgctctgaatgtcgattgggatctccaccgagaccgggccgcacggcggcgtctgcgcctcctgaatcgccttatgcaggatagccaccgcctggttggcgttgctaatgcggtaagcgcgcttcgaactggctttcaggaaggtcaactgatcgcgggtttcatgaatgaaaccggtgtcggcgtccagccaggctttttcgacctgtccggtcaggtgcagcagcggcgtaccggcgttcatcgcctcaaccagcgcgccgaccgcattacccgcacccgcgccggtactggtcagcgccacgccgagccctgaaaaacggccgtgggcgtcagccatggtcaccgagcccgcttcaccgcgcgccggaacaaagcggattttttcccgctggccgacggcatcggcgatcggcaggttatggatagaaatgacgccataaatggcttcaacgtgatactgctccagcgttctggcgatggcatcgccgacggttatcatttcgctcattgctcaccctttctcagtcgcaccagtggttgacgctattacccgtcgccagataaatgctcttttgttgcatccaggctttcagcccctggatccctttttcgcggcccagaccgctctctttaaagcccccaaacggggtcgaaatggagaaaactttgtaggtgttgatccacaccgtaccggcttccagttgttcgctcagacgcagcgcgcggccggtatcgcgcgtccagatccccgccgccagtccgaagaccgaatcattggcctcgcggatcagcgccgcttcatcgtgaaaacgcatcgccaccagaaccggtccgaagatctcttcctggcaaacgcgggcctgattgttcagcccttcaatgatggtcggcaggaaatagctgcctgccgccagcgccggatccgccgggatctcgccgccgcatagcacgctgccgccttcgcgtttcgccagctcgacgtactccagcacgctctgccggtgtttatcgttgatcagcggcccgacgtgggtgccagcgctgaacggatggccaacccgcagcccttgggttaactccagcaggcgggccattaattgcggatacactttgtcatgaacaaacagccgcgagccggcaatacaggcctggccgccggagctgaaaatgccgtagcagatgccccgcgccgcctgttcgatatcggcatcttccagcacgatggtcggtgatttgccgcccagctccagtgacgccgggatcagcttttccgccgccacatgcgccaggtgacgtccggtggtggtgccgccggtaaaggaaattttgcgcaccttaggatggcgggccagcgcatcgcctataatcgatcctttacccggcagcacgctcagcagtccggcgggtaaaccggcctgctcaaagatcttcgccagctccagcgccatgagcggcgtggcttccgccggtttgaggatcaccgcatttccggcggcgatcgccggggccaccttctgcatttcgctggcgatcggcgagttccacggggtgatcgccgccaccacgcccagcggctcatagcggctcagggtcaatagatctgcctgccgcggcgtcggcagctcgccttccagcagttcacaggcggcggcaaaatagcgtgccgtccccgccgcgctcatcaccagccctcgcgcttccgccagcggtttaccattatcgcggctctgcttttgggtgagctcatcaagctgtgcttcaatcagatcggcgactttatgcaggatcttcgcccgctgatgcggcagcatcgcccgccacgttggctcccgccaggcgcggtcggcacagtcgatcgcctcctgtaaatcatcgaggcttgccgcatgcagcgccgcgttaatagcgccatccgccggaaactggctgtgcatcaaattgccgccgccgcgacgccactgaccgccgataaaaatgtctaattcgtccatctcagcctctctgcgttatgccagttcacggcaggcgcgtaccgcgctcagtgccgcgagggtcgatgttttcggattgctggcgagcggcaggccgctcagctccaggtgaaactcgccgaacaatccttcggcgtgtagcgtatgggtgttgcgttgcgtcgccggatcgaccatcagctgtactcgggtcgcgtcaaggccgataccgcccagcgcgatggttgccgccacgttggcatttgccgggaatagccgcgccgcctcgcgggcgctgccttcgaagaaaattttcgcttcattgaccgcgctgaggtcgataagctgttcggcatagctgccgcgccagctggccgggcttttgcgcgaccgataggtcactcgttcaagccccccctctttcgccgccgccaggccatctattccggccaccgcgccagccagcagcgtcaacttgccgcccgcctgacgtaaacgctgttccagttcgctgtccgccaacgcaccggtcgagatcaccgccagatgccagccgcgcgccagtaccgcttcgccgtattgcgcgaccgcctgctgactggcgcattccagcaccagatccggcgtcccaccgcattgcagcggatcggtaagcggcgtcaccgcttgaccaaactgcaggcagatcgctgcgtgatgcgattcgcgcgccacgatccactccaccctcacctgcggcggcaggcgttcaatcaccgcctgggccatcgcgccatagccaattaacatgacctttttcatcatctttccttacagatggcgacagaaaccgccggaaacgtccagcgccgcgccggtggtaaaggaggccagcggcgaagcgaggaatagcagcgcttgcgctggctcctgcggcttaccgagacgcgccatcgggatcccccgcttacgggcgatatcggcggtccactgctgccaactctggctcttatcgcttcggctctcaaaacggcgctgccactgcccggactccaccatccccagcagaatggaattcacacgaatacctttatccaccagctctttcgacagagtcagcgtcatattgagcagcgcggcgcgggcggcagaggtggcgatcatgtgctcttccggctgcagagccagcagcgagttcacacaggtaatcgaggcgatatccgacgcctctagcagggactgaaaggcctttaccgggttaatcacgccgaacagtttcagttcggcttcgtgcagccaggcctcacgtggcgtatcggcgaagtgggcgacatagccctggccggcgttattaatcagcatatcgacgccgccgaaacgcgcggcgaccgcggcggcgaacgcctcaacttccgcttcgttcagtacgtcacagcgccaggagaacacctcaccttctggatattcgttttgcaacgccgcatgggcgctggcaagccgatccgggttgcggccgcaaaaggcgactttcgccccttcgcccagcagcaggcgcagcgtttcaaagccgattcctgacgaaccgccggtgactaccgcgacgcgtccttcaatttgtgcattcatcgcgcacctcttcccctatgcgtaaaagctgttgattaaaaaagatttcgttatcgagatagctggcatgtccagcctgagggatggcgatgtaaggggcgccgtaacgcagcgccactccctgcactaactccggttgggtaatggcatcctgctcgccacaccacacggagagacgaccgcgatagtcggcgagccaacggtgaatgtcgtcatgggccagcatccaggccgcggcgagataaccgtcgcggcgtagcctgcgcatccccgccgccaccgtcgccacatcggcttcgcgcgcgccagggcgcagcagttttgccgcccgcccctgggccatcgcctcgccgcccagcgctatctgctgttgacgcccctgccagactttttcccgctgtgcggcttccgcctggccgtagccctgcgcgacgtcggcgagcaccaggtaaagcaccctctgcgggtatttcgcggcgaaggcggccgccaccagcgcgcccagcgaatggccgaccagtatggtttgctctactccagcgcggtccagcattcgcgccagcgcgtcggcgtaatcgccggcatccgccggcgtcgccgccagcatcgggctttcgccataaccgggcatatcccaggccagcacgcggtagccgggcagcgccatctgtttatgccaggaggccgcgccggaactgatgccgtgcagcagcgtcagcggaataccgcttccttgttcacgaaaccccgtcatcatcgccccttagttacgttttacttttgccagcggatgatcttccgggtaggtcggaatatgcggcttatgggtgccgagcatcacgcacatcagcgcctcttcttcgccgtggttaaacaaaccgcggtaaattccaggcggcaccgagatcagatcgcgttcgcgcagcacggtttcggtatagttgtcgccgtcctgaatcatcagagtgatctgccctttgagcatgaagaacacctcttctacgtcatcatgcaggtgcagcgggccttcacatttggacggcaacaccatggtggaaaaggtgaagtgctcggccggaacggtgttggtatcactggcgacgccggtggcgccggtgccgatgtagcgcatctgcgcgcggcgatatttcggatcgaaatcggcctggaatttcagcgcattccagtcatatttgcggccttcaaagcgcgcgatacgcgactccacccactcttccatcgtcaaatggtcaggtttcaaactttgttttgcagttacggttgaatcagtcatcgttttatcctcagtagcgtctcagcagcggcagtaacagggcgcagcccaccgccgccatcaccgccagaaaaatcagcccggaatccatgctatgggtgaaggcgataagcgcgcccatcaccgccggcgatagcgccccggcaaagtttcccagcccgttgaaaattccacccgccgtggcgctgacccgtggatgggtcgctttagccagcagcgcgaaaatgtttggcgcgccggtgccccacataaaggtgctaaagctcatcgccgcgattaccggcagcggcgtggtgaaatgcatcactgccgccaggccaatacccgcgcctgccagggaaataaagcaggcggcggcgcgcctatcgacgtggtcggacagccaggcgccgataatttcgcctagcaacatggcgataaatggcatcgacgacagccagccggcgtgttccagatgaatgcctttgcctttaatcaggtagcccggcagccagccgttgatcccccacagataggcgagaaaggcgatgttgaagatgcagatcatccaaaaatgcggactcacaaagagctcgcgacgcgcgctgcggcgcgcttcctgcgaggttttatcgctgctcgctctcgcctccagttgcacgccgcgcagcccgatgcgtacaaaaatcagcaccggtatcgtcagcatcgccatcacgaaaaatgtgctctgccagccgaaggtattgagtagccaaattgacagcgggaaacccagcgccgcgccaaccggcgtgccgagcagccacagcatggtggcgcgggcctgtagccgctgcgggaaggtgtggcgcaccacggcgaacgccaacggaaacagcggcccttcagcaatgcccaacaggatgcgcagcgtcaccatcagcgcgtagttgtgggtgaagcccatgatcaccatcaggatgcaccacaccaccatcattccagtcagcagacgcagcggcgcaatccggtcgccaaggccgcttaataacactgacgagaagccgtaactcagcaaaaaggcactcatcagaatgcccaaccgggtggtgtcgaaatcgatgcccatcgcctgctggaagtgactatcggaaaacagcgcggcgatactgattttgtcgaaaaaagccagcagcacgcaggccagcagcgacagcggaatggcccaacgaactgctttttcaggcgtgcggacgccctcgccgctcgcctctgcaggcgcggcgttggtctctaatgtggtcatttctcccccttaagggttcgcgtttcttatcgcaatgacatcagcgagaaagtcgggtcagcgagcgggacgttagagagatcccttcccgccgccatccagcgcttcgccagcttcacgatacgtgcattattgaaggccaccagctgagttaagcgtccatcggcattcagggagaagtagatcgcgccctgcggctcgtcacgcacaatggtccggctgcccgcttgcgggatcccgaggatctggacattgcgatcgtattgatctgaccacagccacggcgcctcgtcgtagccgctggcctgtggatcgagcatcgctttcgctgtcgcgatggcctgattttgcgcaaaggcccacgactgaatgcacagaccgtactgatggtgctgggcgacatcgccagcggcgaaaatcgccggatcgttactgcgcccttgggcattaacgacaatcccgcgatcgacagtgagcccggcatcgcgcgccagttcgagattcagatcgacgccgatccccaccactaccgcatcgaaggtttcccgctggccgtcgcagtgcagcgtcggcaagccgttatcatcttccagctccagcgcgccgcagccgcggcgaatatcaacgccctgcccgcgatgcaactcatccagcgcctgcgagacctccatactgaccgagcgcatgcacagcgccggctgctgttcataaagggtcacggctacgccgcttttgcgcgccgaggcggcgatttcgaggccaatccagccgccgccgacgatcgccagccgcgttgccgatgccaaccgctgcttcagacgctgcgcgtcctgccagtggcgcagggtatatacctgaggatgctgcccccaggcctcggacggcagccgcgcgcggccgccggtggcgatcagcagtaggtcgtacgccagcgtttcgccgttgctcagcgccagggttttattttgccggtcgatcgatttcgcgcgcagcgggcggtaccagcgcaaatccagtgcctgctgcacctcggcgctgaataaccgcggcagcgccggttcggcctccagcaatgccgctttcgacagcggcggacgttcgtaaaaatcccattgctcttcggcaaccacgcaaatctcgccgctaaacccttcatcacgcagcgttttcgctgcccagccgccagcctggccaccgccgataatgactatccgcgccgtcataccgcctccggttttttctgctggcgacgggtatcgtgatcgataccgccttccaccgcccattcggtaaaggacacgagtgaatgctcaagctcgcgcggctgccagttttccgtcagatagtcatcgttggtgtagtactcaaaagcgccgccggtcgggctgttgacataccagaagtaggccgaggagaccggatggcggccgggaccgataaacgtgctccacgcgtttttattcatcgcaatgccgccgccgatcacttcatgaatatcccgcacggtaaacgcgacgtggtttagcccgcgcttgcggttgggcaactgcaataagaagaggttatggtgtccgccgcgcacgccgcagcgcaggaacaccgcgcgattgatgtagcggtctgacacctgaaagccgagtacttcgcgatagaaactttccaccgccgccagctcttcaacaaagaatacgacgtggccgatgttaatgggctgcgcgcggtcgtataccgggctcggagtgtcgatgcgacgcacatcgccccactggttgatcggttcaacgttcagttcaaccgccgtttgctggctaacctgcacccgcagcgtcataccgttgggatcgcggcattccagcgcaccgtcgatttcacggaaagcgggctggcgttccagcttcgggcgtagcgcatccagcgccgcccgatccgccacgccccaggtcatgcgacgcagagtgttgcccgcctcaaaggctggcggcaggtcggcggcatcggtcgggttaagttcgacccgcgcgccgctgagggtggtaaacgcgcggccgctggcgtcgccggtcaggccaaaatcgcgcatgaatttagcgctgtggttcaggtcgtctacgccaaattccagcttttcaattccggtaatactcattattcgtcgcctctttaccgttcagtcgcccgaatttgggcgtaaaacatgcccgacgcaatcaagcgcctgctgttaagttgttgatttaacttgcctgtggcaaatatccgaggaagccggaaattttgtccgctgccatactgacgtcgttctgcaaccgttcgcgatcgctttgcgggatctcgtccgacggcaccagaatgctgacgaccgccgccacccggccgctgcggtcaaagaccggatagacaatcgatgagatgccgtggcgatagaacgattcgccaatcacgtagccgcgggctttatcctgctgcaccatctgccacagcgcttcgcggtcgtacagctggcccggcgtattgcccggcagacgttcattcgggaacaattgttcaaactcgctgcgggaaacatcggtcagcagcatgcggccaagcgaggtgcagtgcaccggtagccgcgttccgacgctgacctggttgatacgcgaaccggcggcgctgacgcgggcgatgtagatgatgtcgcggccgtcgcggatcgccagatggctgctgcacttgctgatatcgcgtagttgctcgatgaccggctgacccacctgagcgacatccagtgaggcgatatattcaaagcccagacgcagtacgttcatgcccagcgaaaaggtattggcgcgggcgttgcgctcaagaaagcccatatattccagcgtctgcaccacgcgataggcggtcgctttcggcatatccaccagccgatgcagctcggcaaaggtcagatcgcgatgctgttcgccaaacgccagcagcagttgtaaaccgcgctcaagaccgggcaccagatacttcacttcctgatcgttcgccataccgcctcacttattagttaaagacaaaaccgccgttgaccgggatcagctggccggtgataaagcgcgaaagatcgctcagcagccagaccacgctgccggtgacatcttccggctgctgcgcgccgctgagcgcgcggccgttctcatacagttgatgacgctcggctggaacgtattccgtggcctcaacgcgggtcagtcccggcgcgatggcgttgatacggatccgcttttcacccagctcgcgggccatagagcgggtcatcgcaatcaccgcgcccttactggcgacataggccatcagccgcggcgcgccccacagtgcggtatccgaagcgacgttgacgatcgccgccccttcgcgcagcagcggtaccgccgcgcgggtcaccaaccaggtgcctttaacgttgaccgtcattacccgatcccacagatccggatcgtaatcgatcatattttttccgccgacgccggtggccatcgctgcgttattgactaagccatcgatagacccctgcgcgccgatggcgctgaagacctgctcgatcgatgcttgactggcaagatcgatggcgtgagattcgacctgatagcccttccgctgcaggcgatgagcgctttccgccagctctccctgcaggatgtcgcacatcaccaccgtcgcgccctgagcggcgcaggcttcggcaaagtggtacccgagaccgcgcgccgcaccggtgacgacaatacgtttaccgtttagcaggccgttcatcaggcggcaccctgctgcgcttcgcggagcgctaactgctctttcgccgctttctgcatcatgcggcgcaggcgggacagaccgacgtcatgttgataaaggtattcatgatcgcgggcgttcggcgccagactttccagcaccacgcgatcctgttccagtacttcccagtgcagtttttccagacggttgcggtacataaagcgccacagatcgcgctgccagccctgaacgccgcggatgcgccagaagaagacgcgacagttatcgttatcttccggaaccaccatgccgacgatccagaagtggccgcccggcccgaaacgctttttgtacggaatagacagacgcatccagtaggcgccgctgttgcccagttcaacccagtcaaagttaacgccgctctgcccttttttctcgaagataaagccggttttcgtcggctgcaggaccatatcggctttgcgatcgccttccgccatcgagtgcgatgacgagtgcagataggtaccgtgcatcgggtccatcacgttttccagcgcgtactggtagttgcatttccacgccgcggtgcacaggaagttactgtatttttcgctatcggctagttcctcagggaagctcaattcatcaggctgctgatcggcggtgacgccaaaccacaggaagattgccccgtgcgcttcgtgcacgctgtagctgcgcacgcactgctggccgaccagcgggcagcgatccaccgccgggacgtctttgacttcgccgttgccggcgacttccacgccgtgataccagcaggcgatacgatcgcctaagttccagcccattgacaggcgtgcgccgcgatgcgggcagcggtcttccagggcctgcacctggccatctttattccgccagaccacgatctgctcgccgagacgggtaatgcctaccggcgcagactgcacttcccagctcgccagcaccggataccacaggccgcgcagtcctttatcaagatagttttgtaccgttgtcgtcatcgctgtgtcctcagtagccgttaacctgtaaaaatgcctggaagctgctttcgctccacggttcgccctgttggtcatgcatcctgacgccattgaggccgttcaccagttcaccgagactttccgcgccctgctcgaacaacgtttccagggtggcgataagctgcagttcccagttttccggcacccggctgcgggtttgccaaatcagattgtgatagtcgccaggcttatggatattgccgtttccgccttccgccggtggcgtaaactggcggctttccggtagcgccgggttgaagtccagggattcgctcatgccacgttctcctcgataaaggtaatctggatctgattgtcgtatacccgcaccgggtaacgattaaggttgcgaccgccgggtccatgcaggcactggccggttttgacgtcgaataccgcctcatgcagcgggcattccaccttgccatcttcgacaaagccctggctcaggagcgcataggcatgagggcaaacgtcttccagcgcgtaatattcgccatcaatcagataaataccgatttccttaccgtcgatattgccgctatatgggaaatcttcctgtacttgctccgcgtcacatacgcctatccagctcatcgcaatcctccaggcttttgtttcatatatgaaactctgtttcttatttaatacggtcaatataaaagcggtgaatgtttcgtcaagcattaatgtgacgaatttgttaatgagtggcttttaaattagctaagtgtgcaattgatcacgaaaaactgcattcagatgaaatgatgatatttaaagcggtgatccattataaataaaaatgccgatttaaatttcacatacgactattgacttcttttcaaatcgatcattaaaaatgggcaacagcggaaaccatggtgtttcacccatgaaacagctatttatttaatcatttaaaaacaatgagtttcataggtgaaccattttactcatgtaactatttctggcgttaaaaaataataactggcaatcattaaattaagcgtggagacaacgaatggcggcaagatggcaaggggtaatagcattacttttgttaataattatttcctacgtcgatcgggtaaatatctcggtgatgatccttaacccggaattcgctgcccattttcagttaaatgaaaacagaatgttacaaggtatgctaatgacatgctttcttctgggttatggtttttcggcattattattaaccccagttatagaaagtagatggcattatcgtcagggactcttaagcagcattgctatatgggcgctggtgtgcgccatttccccgctactcggctcactgctgggaatgttgatcgcgcgcatcgttcttggcgtggcggaggggccgctgttctctctgaaaacgcgctttatcaacgacaacttcgccgctgatgaaataggcaagccgaatgcgctgaccgcccttggcgtatcgttggggctggcggtaggcttcccgctggtcacttggctgatggtgcacgttggctggatcggctccttctacgcgctggcgctgcttaacctgctgctcggcggcggattaatctggcggtttctccccgcgccacaagtaacctcacagcgcgcgaagccgggtttcaggcagactttcgccctcgcctggcgtacaccgctgctaggctggatcctgctggtagaaatcgccacgctcagctatctgtgggggagtagcgcctggttgcccgcctggctgcgcgacgagcaccacttctcgctacagactaccggcctgctggcggctgtcccctttctgttaagcctcggctcaaagtttcttggcggcgtgctcctcgacaaaatgcgcccggagcaggcgccgctgctgtttattatcggcggcctactcaccgccggttctgtgctggcgctgatgctcagccagcagccggcgatgctggcgctgtttatgctggcggcgaacgttttctggggattacagggggcagcgatccccgcggtggttcagcatcacgccccgcgcgaagcggtgggcagcgcctatgggatcattaacggcattggcaatatttgcgcggcgtttattccgctgctgatgggagtggtgatgaaatcggtgggatcggtcagttcaggtttttccgttctggtggcatcgcagctgattacgctgtgcgccggcggcgcactgctgctgcgtatgcgtcgcgcagcagcagtaaacgcgtctataccctaaataagttgcaggacaaaacggctagtcgttttgaacagcgcttgcgctggccccgtaaggacgaggcccagggatgggccgatttattgcccacgcctatgcaacttgcagtatgacgggaacagatttattcgccctttttcgccgcctggatgtacagcatctccagcgccagggtcgccgccgccagagcggtaatttcggactgatcgtaggccggggcgacttccaccacgtccatcccgacgatgttcaggtccttcaggccgcgcaccagcttgatcgcgcggtcggaggtcagcccaccgataaccggggtaccggtgcctggcgcaaacgccggatccagacagtcgatatcaaaggtcaggtacaccggcatgtcgccgacgatctgcttcacctgggcaatcacgtcatcaacgctgcggtcgttaacctggccggcgtcgagcaccgtaaagccattgtctttgtcgaactcggtgcggatcccgatctgtacggagtggttcggatcgataagcccttcgttcggcgcggtatagaacatggtgccgtggtcgaactcgcagccgttggcgtaggtatcggtgtgagcatcgaagtgcaccagcgccattttaccaaagtgcttggcatgggcgcgcagcagcggcagggtaacgaagtggtcgccgccaaaggagagcatacgtttgccggccgccagcagcttctcggcgtgagcctgcagcttctcgctcatttcgcgcgcgtcgccgaaggcgtacaccagatccccgcagtccaccacgttcaggcgctcgcgcatatcgaagttccacgggaaacggttgtgctcccaggcaaggttagtggaaacctgacggatcgccgccgggccatgacggccgcccgcgcgcccggaggtcgccatatcgaacggcacgccggtgatgacccagtccgcatcgctttcatacggcataaagttcattggcaaacgcagaaagccaaaggcattggataccagggagttatcgtattgatgacctaaagtgctcatggatatgacctcttttgacagtcgtggaacgtaaaaaataagtataaaaaaacccctccgcgtcgttaggcccgacgaggaagggtttgatagataaatcgcttattggcgtgaattatcgccggtaatgcatacgggttcaagtgagtatcgcatgctgccggatgacggcttcgccttatccggccgacatacgcaggcccggtcagcgcagcgccaccgggcatcagcagctactcgtcttccagataagtatagccgtacagtcccgcctcgaactcctcgaggaactgctgctgcagcgcgtcgtccagaccggtatttttcacctgatcgcggaactgggtcagcagcgtgttcggatccagctgcacatactgcagcatatccgctacggtatcgccctcgtcggacagctcaacctcaacgctgccgtcagggaagacgaacacgtccaccgcctcggtatcgccgaacaggttgtgcatgttgccgaggatctcctgataggcgccaaccatgaagaagcccagcatcggcgggttctccgggtcgtattccggcatcggcatggtggtggcgatcccgtcgccgtccacgtagtgatcgatggcgccatcggaatcgcaggtgatgtccagcagcaccgcgcggcgctccggcgacttgttcagcccttccagcggcatcaccgggaacagctgatcgatcccccaggcatccggcatcgactggaacaacgagaagttgacgtagattttatccgccattcgctcctgcagctcatcgatgatgggacgatgggcgcggttgctcgggtcgagctgcttctgcacctcatggcacatgttcagatacagctgttccgcccacgcgcgctcctgcaggttgaaggtgcctgaggagtagccgatgtggatatcgtgcaggtccatctggctgtcgtgcagccattcgcgcagcgagcggcggttgccggtctcgtgcatctccagccaggtttcccacatgctctgcagcggacgcgcagcgtcttccgccggcggggtcgcctcggtgtattcgttacgctcaacgccgatgatgttggaaaccagcacggtatggtgcgcggtcaccgcgcggccggactcggtgatcaccgtcgggtgcggcaggccattctcttcgcaggcatcgccgatcgcccagatgatattgttggcgtattcgttcagaccgtagttcaccgagcaatcggactgcgagcgggtgccttcatagtccacgcccaggccgccgccgacgtcgaagcactgaatgttgacacccagcttatgtagttcgacgtagaaacgcaccgattcacgcacgccggtggcgatatcgcgaatgttagccatctgcgaaccgaggtggaagtgcagcagttgcaggctctcaagatggcctgcctcgcgcagaatttcgaccagttgcagcacctgggtcgctgcgaggccgaacttggacttctcgccgccggaggactgccatttaccggagccctgcgaggccagacgcgcacgtacgccaaggcgcggcaccacgttcaggcgctcggcctcttccagtacgatagcgatctcggacatcttctcaatgaccagatagaccttgtggcccatcttctcgcccaccagcgccagacggatatattcgcggtctttataaccattacagacgatgacgctgcgggtcatcccggcgtgcgccagcacggccatcagttccgctttcgaaccggcttccaggcccagcggctcgccggaatggatcagcgattcaatcacgcgacggtgctggttaaccttgatcgggtagacgaggaagtaatcgccgttatagccatacgattcacgcgcgcgtttgaaggcggcgttgatcgagcgcaggcggtgctgcaggatctgcgggaagcagaacagcgccggcaagcgctgcccttgcgcttcacgcgctttgactaattccgcgaggtcaacgcgcgcttccgggacgtccggatccgggcaaacgctgatgtggcccagttcgttgacgtcataatagttattgccccaccaggcaatattataagtacgcagcatcttgctggcttcctgggagctcatcgctacctcctgcatggaacgtagtacaccgtgttcgcctgctgacgaaggcgaaaccatagacatgtcgtcagacatagcgaacctcaatttttaataataagtgtaagacagttaactactatcgcagtccaaagatgcgataacaacccatgaacagtcctaaagcccagcactatctgctggttttgcgactgcgcgaccggtttcttattcatatcatcgtaaaacacgtagccgaacagagtatgacagtccggagaaaccacgagaaaactcttgccaggcaagagcgcccttgttcagttttctgacggccgaccggccctggaatcctgagaagcgccgagatggggtgaacatcggctggtttgcatgagagagatgcaggttgcggagtgctgacgcgcgacagaacgacgcgacgaatcaaacgaaaaacattggttcattatctggtatcacctccacaccgccctgcgacagggtcggcgacaagccaaagctatacataccgggcaacaggcgctacgccgctgcgagattctgtaaatacagactgcttaacccggctggaagtggcaccacagggccatgccccgtgcgcttttttaatgagccgcgcgcggcgttttataccgagaagcggggtaaaaagcaaaataaaaatgtgcctgtttgcgcggttgtcaggaaattttgccaggcgggttttcccataaatgcgaccgccatcaaaaaaggctggaaatgggctcaagatttgacctaaaatggccgtccagaagttaatccgtctatactgattaacactcagactgctcgtgtcgctacctgcgcggctttgcgctgattatccaccaaagccacattacacaacagtatgagctatccgaatcgtccacaggtgaaataaaatatggcaaaacacctttttacgtctgagtccgtatcagaagggcatcctgacaaaattgctgaccaaatctccgatgccgtgctggatgcgatcctcgagcaggatccgaaagcgcgtgtcgcatgtgaaacctatgtcaaaaccggcatggtgctggtaggcggcgaaatcaccaccagcgcatgggttgatatcgaagagatcacccgcaacaccgtccgcgaaattggctacgtgcattccgatatgggctttgacgccaactcgtgcgccgtactgagcgccattggtaaacagtctccggacattaaccagggcgttgaccgtgccgatccgctggaacagggcgccggcgaccaggggctgatgtttggctacgccactaacgaaaccgacgtgctgatgccggcgccggtgacttacgctcaccgtctggtgcagcgtcaggctgaagtgcgtaaaaacggcaccctgccgtggctgcgcccggatgcgaaaagccaggtgaccttccagtatgacgacggcaaaatcgtcggcatcgacgcggtcgttctgtcgactcagcacgcggaagatatcgatcagaaatccctgcaggaagcagtgatggaagagatcatcaagccgattctgccgaccgaatggctcaacgcgtccaccaaattcttcatcaacccgaccggccgtttcgttattggcggcccgatgggcgactgcggtctgaccggtcgtaagatcatcgttgatacctacggcggcatggctcgccacggcggcggcgcgttctccggtaaagatccatctaaagttgaccgttccgcagcctacgcggcgcgctatgtggcgaagaacatcgttgccgcaggcctggccgatcgttgcgaaattcaggtttcctacgctatcggcgttgcagaaccgacgtccatcatggtggaaacctttggcaccgagaaagtgccttctgaacagctgaccctgctggtgcgcgagttcttcgacctgcgtccatacggcctgattcagatgctggatctgctgcacccgatctacaaagaaaccgcagcctacggtcactttggtcgcgaacatttcccatgggaaaaaaccgacaaagcggcgctgctgcgggaagcggccggtctgaaataatctccgcgcttcctctcttcaaggccagcctcgcgctggcctttttatttacgcctccccccccttttctgcgcccccatttcaacgcgcggccgccaaaaaatgaaagcgattacatagtaaagactgtcaccttctgcccaaagacgctatctcctgtacccatttttcacaatgttacatattgtttcggtcaactctgattaccgtttttcaaaatgtcgtctatccttgtttatattgctgatttaaaaagcatttaatgaattacgtttctttacctttgtggaaacgattacacagccgtgattatagtcacgtttttttaccgacgagtgtcctaccctaaccatcgacagaatcaataactcaactggagggcgttatgcctgacaacaaaaaacaagggcgttcgaacaagactatgacgttcttcgtctgtttcctcgccgcgctggctggcctgctgttcggccttgatatcggtgttattgcgggtgccttaccctttattgccaatgagttccagatttccgcccacacccaagagtgggtggtcagctccatgatgttcggggctgccgtcggcgcggtcggcagcggctggctctctttcaaactgggccggaaaaagagcctgatgatcggcgcaatcctcttcgtcgccggttcgctgttctctgccgccgcgccaaacgtcgagatcctgctggtttcccgtgtgctgctcggcctggcggtgggcgtcgcctcatatacggctccgctgtatctgtcggaaatcgccccagaaaaaattcgcggcagtatgatttccatgtaccagctgatgatcaccatcgggatccttggcgcctatctctctgacaccgctttcagctacagcggcgcatggcgctggatgctcggggttatcatcattccggcggtattgctgctgatcggcgttatcttcctgccggacagcccgcgctggttcgccgccaaacgtcgctttgtcgatgcggaacgcgtgctgctgcgcctgcgcgatactagcgccgaagcgaaacgcgagctcgatgaaatccgtgaaagcctgaaggtaaaacagtccggctggtcgctgtttaaagacaacagcaacttccgccgcgcggtgttcctcggcatcctgctgcaggtgatgcaacagttcaccgggatgaacgtcatcatgtactacgcgccgaagatttttgagctggcgggttatgccaacaccactgagcaaatgtgggggacagtgatcgtcggtctgactaacgtgctggccacctttatcgccatcggtctggtcgaccgctggggccgtaaaccgacgctgatccttggctttatcgtgatggccgcgggtatgggcgtcttgggtaccatgatgcacatcggcattcactcctctaccgcgcagtacatcgccgtcctgatgctgctgatgttcatcgtcggtttcgccatgagcgccggcccgctgatttgggtactgtgctccgaaatccagccgctgaaaggccgcgacttcggtatcacctgctccacagcgaccaactggattgccaacatgattgtcggcgccaccttcctgaccatgctcaactcgctgggcagcgccaataccttctgggtgtacggcggtctgaacgtgctgtttatcctgctgacgctgtggctgatcccggaaaccaaaaacgtctcgctggaacatattgaacgtaacctgatgcagggtcgtccactgcgcgagatcggtgcccgcgattaaccttcctgagcttcctcccatcccgggaggaagcttcctcttgctctcccccctccgccgcactatcctctggcgctatgaaaacgccccgtattcccatcgctattcagcaggccgtcatgcgcagcctgcgggagcatctcgccaatgcgaatcgcaagctggaacgccgctatgcggaaccgacgctggtctaccagcagcgtggtacttccgccggcaccgcctggctggagaaaaacgaaattcgtttaaacccggtgctactgctggaaaatcagcgtgagtttatcgatgaagtggtgccgcatgagctggcgcacctgctggtctggcagcatttcggccgcgtcgcgccgcacgggaaagagtggaaatggatgatggagagcgtccttggcgttcccgcgcgtcgcacccaccgctttgaactcgcttcggtccgccagaacaccttcccctatcgctgtcgctgtcagcagcaccagctcaccgtccgtcgccataaccgggtggttcgcggcgaggccacctaccgctgcgttcgctgcggcgatctgctggtggctgaaaaataaccatcggaattaattagaaactttctgatctgactgattgcatccggcaccctcattcgctacgttgcgggctcgttttgacacggagttaacgatgtcccgtatgcatgttttagccgtagcggtattgagcgcggcagtcagtggtccgcttgcggccgctggtattaatagtttttcccaggccaaagccgctggcgtcaaagtgaatgccgacgttccgggcgatttttattgcggctgtaaaatcgactggcaggggaaaaaaggcgttatcgatttggaatcctgcggctataaagtgcgtaaaaatgagaaccgcgccagccgggttgaatgggagcacgtagtgccggcatggcagttcggccatcagcgtcagtgctggcaggagggtggacgtaaaaactgcgccaaagatccggaataccgcaagatggaaagcgatatgcacaacctgcagccggcggtgggagaagtgaatggcgatcgcggcaactttatgtacagccagtggaacggcggtgaaggccagtacggccagtgcacaatgaaggtcgattttaaagataaaatcgccgagccccctgcccgcgctcgcggcgccatcgcccgcacctacttctatatgcgcgaccgctatcagctgaatctttcccgccagcaaactcagctgtttaccgcctggaataaacagtacccggtcaccgcctgggaatgtgaacgtgatgagcgcatcgcgaaagtgcagggcaaccataatccgtatgtccagcaggcttgccaggcgcaaaagagctaacctacactagcggcaattgttaatttgcagccctgtgcttcccgcccgatggcgggaagctggcatctgcgcaacgaacggaatatcaagcatgcgcattcctcgcatccatcatccagaacgcctcattgtcggcagccagatcgcgctgagcgatgacgcggccaaccacgtcggccgcgtcctgcgcatgaccgccggtcagcacctacagctttttgacggcagtaaccaggtgtttgacgcggtcatcaccgaggccggtaagaaaaacgttacggttgaggtgctcagtggcgaacctgacgatcgggaatcgccgctgcatatccatttaggccaggtgatgtcccgcggcgaaaaaatggaattcaccatccagaaatcgatcgaactcggggtaagcctcataacgccactgttttccgagcgctgcggcgttaaactggatgccgaacgtttgcagaaaaagatccagcagtggcagaaaatcgctattgccgcctgcgaacagagcggtcgtaacgtggtaccggaaatacgtccggcgatgcagctggaggcgtggtgcgccgagcaggacagcgggctgaagctcaacctgcacccgcgcgccagcgccagcattaacacgctgccgctgccggttgaacgcgtccgtctgctgattggcccggaaggcgggctgtcggctgaagagatagcgatgaccgcgcaataccagtttactgatatcctgttgggaccgcgcgttctgcgtacagagactactgcgctcaccgccatcaccgccctacaggtgcgttttggcgacttaggttgaggcgttaacggagaagaaccatgatcaagctcggcatcgtgatggatcccatcgcaaccatcaacatcaagaaagacaccagcttcgctatgttgctggaggcgcagcgtcgcggctatgaactccattatatggagatgaacgacctctatttgatcaacggcgaagcccgcgcccggacgcgcacgctgagcgtcgaacagaactacgataaatggtatgacttcaccggcgagcaggatctgccgctggcggaccttgacgtcatcctgatgcgtaaggatccgccgtttgataccgaatttatttatgccacctacatcctggagcgggcggaagagaaaggcacgcttatcgtcaacaagccgcagagtctgcgcgactgtaacgagaagctgttcaccgcctggttctctgaactgactccggaaacgttggtcacccgcaataaagcccagctgaaagccttctgggaaaagcacggcgatatcatcatgaaaccgctcgacggcatgggcggcgcctctattttccgggttaaagccggcgatccaaaccttggggtgattgccgagacgctgaccgaactgggcagccgctactgcatggcgcagaactatctgccggccattaaagatggcgacaagcgcgtgttggtagtggatggagagcccgtgccttactgcctggcgcgaattccgcagggtggcgagacccgcggcaatctggccgccggcggccgcggcgaagcccgcccgttgaccgaaagcgactgggaaatcgcccgccgcgtcggcccgacgctgaaggccaaaggccttatcttcgtcggcctggatatcatcggcgaccgtctgacggaaattaacgtcaccagccccacctgcgtacgcgaaatcgaagccgccttcccggatatttcgatcaccggtatgctgatggacgctatcgaaagacgtatcgataaataagcacgacggcggaccaacgtccgcttttggcgcagcgagcgcggattaccgcgctcgtgaaacgttgccagcctgacgccactcgggcgccagccagataaagtgcatcgacaccattctactttgcccgcatactgggtgttgcttttttgaaccaggaacgaacctctgacaatgaatttacagcatcactttctgattgccatgcccgcgcttcaggaccccattttccgccgctccgtagtctatatctgcgagtacaacgacgagggtgccatgggcattattatcaataagccgctggaaaatctgcaggtggaagggatccttgagaagctcaaaattgtcccggagccgcgcaatccagagatccgtctggataaaccggtgatgctgggaggcccgctggcggaagaccgcggcttcattttgcataccccgccctctgacttttcctcgagcattcgcatctcggataacacggtgattaccacctcgcgggatgttcttgaaaccttaggaaccgatcggcagccgggcaacgtgctggttgcgttgggctactcttcgtgggagaaagggcagctggagcaggagattttagataatgcctggctcaccgccccggcggatcagaatattcttttccgtacgccgatcgccgatcgctggcgcgaggcggctaaactgattggtatcgacattgtgacgatgccaggcgtcgcggggcatgcgtgatgagcggaacctttctcggctttgactttggcaccaaaagcatcggcgtggcggtgggacaacgcatcaccgcgaccgcacgaccattaccggcgctgaaggcgcaggatggtaaaccggactggaacgtcatcgaaaaactgcttaaagagtggcagcctgaggcggtaatcgtcggcctgccgctcaatatggacggcaccgagcaaccgctgacggcgcgcgcgcgtaatttcgccaataaaattcatggccgctttggcgtcgcgatccttctccacgatgaacggctgagtacggttgaggcccgcgcgggcctgtttgaacacggcggctaccgggcgctgaataaaggcagcgtcgattcagcctctgccgtagtcatactggaaagctacttcgagcagagcttttaaactctgccctcctgcgccgccggcggaccgctgacggcgcacgtttacccgcttagtggcgcagatgttcgttagcccagctcaccgcctgggtgcgatttttcacgctcagtttacgaaacacattgtacaggtgcgtccgcaccgtgttctcgctgataaacagcgcgcgggcgatatccaggttcgtcgcgccgcagcgcagttcgttgaggatctcgcattcccgctcggtcagcggcgagttctctactggagtcgatgcatggtccgcagcgtacatcgccgggtgcatcacgctcaattcagccgtctgctcgccgttcagcacggccttaacgccctcaattaagcgcgattcatcatcgtcatgacggaacacgccatataaagccggccactgcgccatttcgtatagctcatacttttgtgcgctattaataatcaacaaacgaggattatctgcctgcaggcgaataatatcccgccacaccccgtttaatttcttatttgacactgcaatatcaaataatattacagaatcttttgccaaacgctgcgccagcggtttattaatattttgtaaaaccaccggtgccatcagggtttcgctcagatagctggcaaaggctttgctttgaatagacgggtgggtaataaaggttacctgacgagaagatgatgaatttccatttaaattaatcacttaaaactctccttagctgttacccaccgccatggtggttaaatgaataaaaaaagatacaaacagtcgtgaatttataaatcaccaaggtaatttacaaactgaaacgttattccatgagaatcatcctattcccacaaacagcataaatcgaatgactcaaagctgtcaaaagataatcaaacttttttcctggaaatgcgtattcactgtcgacatatctaatctgaatgtgttatttgaatttataatcaaaagttatttgtattaccaaataatattaataaacaacaaataaacattcatctaacatattatttaacctgtcatatcaatctctttctcatcttatagcgcgcctgcagcgacacattgctgaaaactctgggtaaaggtcaacattccggcctgcatcccggtctgcatcacaccaggcaattgatgtacttttccttcacggatcaaattcgccaccgctggcgtgttgaccagaagctcgtatagcgcaactctcccgccctgacgtgcaggtaacaatttttgcgccagtaccgcgcacaggcttccggcaagctggctacgaacctgatctttctcctccgccggaaagacatcgattaatctctccaccgccggcgccgcgccgcgggtatgtaatgtcgccattaccaggtgcccggtctccgccgcggttaacgccaggcgaatggtttcgctatcgcgtagctccccgagcaggatcacatccggatcctggcgcagcgccacgcggagcgccgcggcgaacgaaggacagtgacggccaacttcccgctgctggatcagacagcgctcgctgtgatgaataaattccaccggatcttcaagcgtcagaatatggccatcaagatgctgattgaggtgccccaccattgccgccagggtggtcgacttgccgctgcccgtcgctccggtgaccaacagcaaaccactctcttccgccagcagttcgctcagcgcaggcggggcgccgagcgtgtccagacgcgggcactgttcaggaaggaggcgcagcaccagcgatatcccacgcgtatgggcgaaggcgctggcgcgcagccgcgcaccgcaggccagggtcagcgcaaagtcaatctggccgtgttcctgccagtgcagtaactgtgcggcatcgagccagtcgttgagtaaattcgcaatatccggcgcgggaaagggcgcgggctgcagcctgccctgccgccgccagcgtggtgcggcggaattgcacaggtgtagatcggagacattatgctttacactaagggctacgatttcttccagcttcataactcatcctcggaatatgaacgatattgcgcataacctggcacaggtccgggacaaaatctccggtgctgccgccctatgcgggcgtgcgccagaagaagtgacattgcttgcagtgagtaaaacgaaacctgcgagcgcgatcgaagaagccattgcggcaggccagcgggcatttggtgaaaactacgtccaggagggcgtggagaagattaaccatttccagcaggctggcgtcagcgggctgcagtggcactttattggccccctgcagtccaacaaaagtcggttggtggcagagcattttgactggtgccacaccgtcgatcggctgaaaatcgccacccgcctgaacgagcagcgcccggcgcatttgccgccgctgaaggtgctgattcaaattaacatcagcgatgagcagagcaaatccggcatcccgctggaagcgctcgacggcttagcggcggagatcgctgagttacctcatctggaactgcgcggcctgatggccatccccgcgcctgagtcagaatatgtaaggcagtttgccgtcgcccggcaaatggcggtagcatttgcgcgattaaaaacgcggtaccccacggtcgatacgttgtctctgggaatgtcggacgatatggaagccgcaatcgcggcgggaagcacgatggtgcgcatcggtacagccatttttggtgcgcgcgactacagcaaataataaggaatctgaggaacgccatgaagacgttgactttcctgctttcaacggtcattgagctttacacgatggtcgtgttgttacgcgtctggatgcagtgggcgcgctgcgacttttacaatccgttttcgcagtttgtggtgaaagccacgcagccgattgtcggaccgctgcgccggattatcccggcaatggggccgattgacagcgcctcgctgctggtggcatttattctctgcgtcatcaaagcgatcgtgctgtttatggtgatcaccttccagccgatcatctggatctccgctctgcttattctgctgaaaaccatcggctcgttgatcttctgggtactgctattgatggcgatcatgagctgggtcagccagggccgtagcccggtggagtatgtgctgatgcagctggcggacccgctgctgcgccctatccgcaacctgctgccgtcgatgggcggtatcgatttctcgccgatggtgctggtactgctgttgtacgtaatcaatatgggcatcgccgaagtgctgcaggccaccggtaatgtactgctgccggggctgtggatggcgctatgagtgccgttgaaacctgcgctgacgggctggtgttgaggctgtacattcagcctaaggccagccgcgatagcatcgtgggcgtacatggcgacgagcttaaagtcgccattaccgccccgcccgttgatggccaggccaatgcccacctggtgaaatttctcgccaaacagttccgcgtcgccaaaagccaggtactgattgaaaaaggcgagctgggccgccataagcaagttaaaatcatcgccccacaacagatcccgactgcggtcgcggcgctaactgaataaacaggattcatcatgcaaaaagtcgtcctcgctaccggcaacgccggcaaagtgcgcgaactggcctcgctgctggaagattttggtctcgatatcgtcgctcagaccgagctgggcgtggactctgcggaagagaccggcctgaccttcattgaaaacgcgattctgaaagcgcgccacgcggcgcagatcaccggcctgccggccatcgccgacgattccggtctggccgtcgatgctcttggcggcgcgccgggtatttactccgcacgctattccggcgtcgatgccagcgaccagcagaatcttgagaagctgctcgacgcgttaaaggacgtgccggacgaccagcgtcaggcccagttccactgcgtgctggtctatctgcgccatgccgaggatcccacgccgctggtgtgccacggcagctggcctggggtaatcacccgacaagccgccggtcatggcggcttcggttacgacccgatcttcttcgtcccgtcagaagggaaaaccgcggccgaactgagccgtgaagaaaagagcgccatttcccatcgcgggcaggcgctgaaactgttactggaagcattacgtaatggctaatttgccgccgctgagtctctatatccatattccctggtgcgtgcagaaatgcccgtactgtgattttaattcgcatgcgctgaaaggcgaggtgccgcatgatgactacgtccagcatctgctgaacgatctgcaggctgatgcgcaatatgcccagggacgggaaataggcactatttttatcggcggcggaacgccgagcctgctgtccggcccggccatgcaaaccctgctggatggcgtccgcgcctgcctgccgctggccgccggggcggaaatcaccatggaagccaacccgggtaccgtggaggccgatcgcttcgttgattatcagcgcgccggggtgaaccgcatctccatcggcgtacaaagctttagcgaaccgaagctgcagcgcctggggcggatccacggcccggaggaggccaagcgcgcagcacgtctcgccagcggcctcggcttgcgcagcttcaacctcgacctgatgcacggtctgccggaccagtcgctggaggaggcgctggacgatctgcgtcaggcgattgccctcaacccgccgcacctgtcgtggtaccagctgaccattgagccgaacaccttgttcggctcccggccgccggtgctgccggatgacgacgcgctatgggatattttcgagcaggggcatcagctgctgagcgccgccggctatcagcagtacgagacgtccgcctatgctaagccaggcttccagtgtcagcataatctcaactactggcgctttggcgactacctcggcatcggctgcggcgcgcacggcaagatcaccttccctgacggacgcattctgcgaaccgccaaaacccgccacccgcgcgggtatatggaaggccgttaccttgagcgtcagcatgatgtggaagaagcggataaaccgtttgagttctttatgaaccgttttcgcctgctggaggccgcgccgcgcgctgaatttagccgctataccggacttgaggaagcggcgatccgcccgcagctggacgcggcgatagcccagggctacctgcaggaagacgagcagaactggcagattaccgagcacggtaagctgttcctgaattccctgcttgagttgtttctgaacgagtaaacgcagcggcggtcctgccgggaagcggaccgccatggcattatttcagcgagccaaccagcgctttgcggctgtcctccagcgataccacccggctgcagacgtccttaccaaactgctggaaatcggcctcctggtttttccattcctcctgaatcgccgtttgcaggccgccgaggctgccaagaatgccctgtaacggattaccgccgcctttgagcaccgctttggcgcccatctcgttaatgctgtcctgcagaatgccgcccatcgcctgattcaccagctgctggccatcggcgcgtacctggtcgatggctttatagtggaaggtcaggccatcgctgcggcgctcaattatgcggttcatctgttctttcagctgcgcgtccagtttggtcaggcgaccgtgcatgctgctgttggcgccaacctgttcggtaatgattttatccagcgccttgcggcttttttcgactcgcgaacgcgcgccttcgtcaatccacggcaggctgctgcgcaggctggcctgataatcctgcgcctgttcgcgctgggcggcgctgagcgcataggccttgccgttaaaggtcagattgccgtccggctttatcaccagatcgccgttttcccctttcacctgcacctgctgcgggctgaggatcacatcgtcacgcggcgtgacgctacactggtagtccgcatgggcagacaaagcggtgacggagagcgccaccgccagcagcgttttacgcatcataaaactcccttaagacaaaacgggccggcaattgccgacccttgtcaaacttagtcccaccagacgtcaaaaagttcgctggtgcgcacatcctctaacttacgcgcttccagccatttgcgtacgatagcctgatgctcttcagtgcacttaccaatctcctgcatgcagatgagcccttcccaggagagataaccgctgccgtcgaaggccagcttgttcggctctatcacctcttcgatcagatcgttgaccgtctggtcgatctgctcttcgctggtcccttccgggaaacgccaggcgacggagaagcctaactcctgaaactcatcgatatgcatttttttacgcagacgacggctacgattcttggccattatttcaccctctcgaacattaagtcccatacgccgtggccgagacgatggccacgctgttcaaatttggttaccgggcgcgattccgggcgcggtacgtaatcgttgcttgccgactggttacgatagccttccagcgaggacatgacttccagcatatgcacggcataggcttcccagtcggtcgccatatggaagacgccgccgagcttcaacttgcttttcaccagctcagcgaaaggcggctgcacgatacgacgtttattatgacgcgctttatgccacggatcagggaaaaacagttgcaccatattcagcgagttatccgggatcatggtatgcagcacttccaccgcatcgtgacacattacgcgcaggttttgtacgccttcttcttccgcagaagccagacaagcgccaacgcccggggagtgtacttcaatgccgaggaaattctgttccggtttggctttcgccatcgccaccagcgaggcgcccatcccgaagccaatttctaaggtgaccggcgcgtcacggccaaacagggcggcgaaatcgagcggcgcatcgttgaattcaacgcccatcaccggccaaatgttatccagcgcatgctgctgccctttcgtcaggcggccctggcgacggacgaagctacgaatccggcgcagcgggcgaccgttttcatcgaattccggagagatgacgtcgtttttcataaaagtttggtctgcttgtgaatgtgttcggaaaacgggcattatccaaagttacccggcggatgcaagggtttacagccactcgcccttatgctgcaatctgcccccctgtaatcgcgatcccggagccgtagctttgacttttctcgccacgcaattttcagcccaggttctggactggtacgacaaatacgggcgtaaaaccctgccctggcaaatcgccaagacgccctacaaagtatggctctccgaagtgatgttgcaacaaacccaggtgaccacggtaatcccctattttgaacgctttatggcgcgtttccccacggtggtggatctcgccaacgcgccgctggatgaagtgctgcatctgtggaccggtctgggctactatgcccgggcgcgcaacttacataaagccgcgcagcaagtcgccacactgcacggcggcgaattcccccggacctttgacgaagtggcggcgctgcccggcgtcgggcgctcaacggcgggggcgattttatccctttcgctcggtcagcattatccgattctcgacggcaacgtgaagcgcgtgctcgcccgctgctatgctgtcagcggctggccggggaaaaaagaggtggaaaaacggctgtgggacatcagcgaagaggtcaccccggcagagggcgtcgagcgcttcaaccaggcgatgatggatctcggggcaatggtttgcacccgctcgaagccgaagtgcgagctgtgtccgctgagcaacggctgcgtggcctacgcgaaccattcatgggcggaatatccgggcaaaaaaccgaagcagaccctcccggaacgcaccggctacttcctgctgatgcagcacggcgacgaggtgtttctttcccagcgtccgccggtgggtctgtggggcgggttgttctgttttccgcagtttgcagacgaagcggagctacgcgagtggctggcgcagcgccagataaaggccgataatctgacgcaattaaccgcttttcgccacactttcagccatttccacctggatattgtgccgatgtggcttacagtgcactcatctggcgcatgcatggatgaaggcaacgcactctggtataacttagcgcagccgccgtcggtcggtctggcggcccccgtggagcgcttgttgcaacagctaaaagccggagcgccggtataaatttttcggctatcaaagaggattaattatgagcagaaccattttttgtaccttcctgcagcgtgaagcggacggccaggatttccagctgtatccgggcgagctcggaaagcgtatttacaacgaaatctccaaagaagcctgggcgcagtggcagcacaagcagaccatgctgatcaacgagaaaaagctcagcatgatgaacccggagcaccgcaaactgcttgagcaggagatggtgcagttcctgtttgaagggaaagacgtgcacatcgaaggctacacgccgccggaaaaacagtaagggccctgcggcctttaaaaaaacaaacacaacacgcacgcccggaatgatgaaaaaatacttagcgctcgcgctgattgcgccgttgctcgtttcgtgttccagctccaataaaaaaggcgccgaatacaacgaggcctgggtcaaggacacgaacggattcgatattttgatgggccagttcgcccacaacatcgagaacatttgggggtacaacgaagtcctgctcgccgggccaaaggactacgtcaagtacaccgaccagtatcaaacccgcagccacatcaacttcgatgaagggacgatcaccgtcgagaccattgccggcaccgaccctcgcggacgactgcgccaggctatcgtcaaaaccctgttgatgggcgatgaccccaactccattgacctctattccgatgtcgatgacatccagatctccaaagagccgttcctctatggccaggtggtggataacaccggggcgtcgattcgctgggagtggcgcgccgcgcgctttgccgactatctgctgcaaacccgtctgaagagccgcaacaacggcctgcgcgtggtctacagcatcaccattaacctggtgccgaaccacctcgacaaacgtgcgcataaatacctcggcatggtgcgtcaggcctcgcgtaagtatggggttgatgagtcgctgatcctcgcgattatgcagaccgaatcctcctttaacccctatgcggtcagccatgccgacgccatggggctgatgcaggtggtccagcacagcgccggcagagacgtcttccgctcccagggtaaatccggcctgccaagccgcagctatctgtttgacccggcgaataacatcgacaccggtaccgcctacctggcgatgctgaacaatgtttacctcgccggcatcgataaccccacctcgcgtcgctacgcggtgatcactgcctataacggcggcgccggcagcgtactgcgggtcttctccagcgataaagtgcaggcggccaatattatcaacagcatggcgccaggggacgtctaccagacgctgaccacccgccatccgtcggcggaatcgcgccgctatctgtacaaagttaatacggcgcagaaaagctaccgccgtaaatagccctcctcccgactccggcctcagccccgcgctgaggccgcgcttattctccgccatactctgtaatatctttcggttttctgcggcagttaacagaagcattaagctagtgaatgatagaatcgcatcaaaataacgggattaatgttattttaaaaacataacaagcccacattcgtgaggataactacatgaatcttaagctgcagctcaaaatactgtcgttcctgcagttctgcctttgggggagctggctcaccacgcttggctcgtacatgtttgtcacgctgaagtttgacggcgcggcaatcggcgcagtgtatagctcgctcggtatcgccgcggtgttgatgccgacgctgctcggcatcgtcgccgataagtggatcagcgccaaatgggtatacgccatctgccacctggtcggcgcgttaacgctgtacctcgcggcgcaggtcaccacgccgggcgagatgttcctcgtgatcctgcttaactcgctggcctacatgccgacgcttggcttgatcaataccatctcctactaccgcctgcagtcggcggggctggatattgtcaccgatttcccgccaattcgtatctggggcaccatcggctttatcctcgccatgtggggcgtgagcttctccggctttgaactgagccatatgcagctgtacattggcgcgacgctgtcggtcctgctgactctgttcaccctgacgctgccgcatattccggtcgccaacgcccagcgcaatcaaagctgggcggagatgctcggcctgaacgcttttgcgctgtttaaaaacaagcgtatggctatcttctttatcttctcgatgatgctcggcgccgagctgcaaatcactaacatgttcggtaacaccttcctgcacagcttcgataaagatccgctgtttgccggcagctttatcgtcgagcacgcgtcagtgctgatgtcgatttcgcagatttccgaaacgctgtttatcctgaccatcccattcttccttagccgctacggcattaagaatgtgatgcttatcagtattgtggcgtggatgctgcgcttcggcctgttcgcctttggcgacccgacgccgttcggcactgtactgctggtgctgtcgatgatcgtctacggctgcgccttcgacttctttaacatctccggttcggtgttcgttgagaaagaggtgcgcccggaaatccgcgccagcgctcaggggatgttcctgatgatgaccaacggcttcggctgtattctcggcgggatggtgagcggcaaagtcgtcgaacactttaccgtcgaggggatcactgactggcagagcgtgtggctgattttcgccggctattcgctggtgctggcctttgccttcgtggcgctgttcaaatacaaacacgtcagacaaccgaccgccgcccagcagagcgtgtgatcggcaaaagtaaaacgccccgcctgttcggcggggcgtttttttatcccttcagcacgtagccatacagccgcttaatgccgtccggatccgtctcgctgtaaaccccctgcagctccggcgagaagccaggcagcatattgaccccctcttccagcgcgaggaaatagcgcagcacggcgccgccccagacctcgccgggcaccacgcacagcacgcccggcggatacggcagcgccccctccgccgcgacgcggccttccgcctcgctcagacgcaccagctcaacgttgccgcgaataaactcgtggttggcatcctggggattcatcaccacccttgggaagctccgtttacggaacatctctttttgcaggctcttcacgtcaaagctaacgtacagatcgtgcatctcctggcacagctcgcgcagggtatagtcgcgataacgcaccggatatttgttatagatggtcggcaacacatcggccagcggcgtatccgcttcaatatgctgttcaaactgcccgagcatcgctaccagctgcgccattttttcggcactttccgccggcgtcagcaggaacagaatcgagttgagatcgcacttctccggcacgatgccgttttcacgcagataatgcgccagaatagtcgccggaatgccgaactcactgtactccccactctccgcgtcgatgcccggggtggtcagcagcagcttgcacgggtcgacaaaatactggtcgtccgcgtagccttcaaaaccatgccagcgcgcgtcgggttcgaagctgaagaagcggcgctcccgggcgatcgcctcggtcgggtgatcctgccacgggcgccccgccaccgtcggcggaataaagggctggatcatcttgcagttagcgatgatcgctttgcgcgcctcgatgcccagcgccacacactcggcccacaggcggcggccgctctcaccttcatgaattttggcgttgacgtccagcgcggcaaacagcggatagaacgggctggtggaggcatgcagcataaaggcgttattcagccgcttgtgcggacagaaacgcgcctggccgcgcagatggttatcctttttatggatctgcgacgtctgtgagaagccggcctgctgcttgtgcacggactgggtgacaaaaatacccggatcgtcgggggtcagctccagcagcagcggcgagcagtcggccatcattgggataaactgctcatagcccacccacgccgagtcgaacaggatgtaatcgcagaggtggccgatcttatccaccacctggcgggcgttatagaccgtgccgtcgtaggtccccagctggatcaccgccagacgaaacgggcgggaggcattggctttctcaggcgccgcttcgcggatgagatcccgcaggtaatgctcatcaaagcagcgctcgtcaatgccgccgataaagccgaacggattgcgcgcggcttccaggtaaacaggcgtcgcccccgcctggatcagcgccccgtgatggtttgacttgtggttgttgcgatcgaacagcaccagatcgccgcgggtcaacagcgcgttggtcacgactttgttggccgccgaggtgccgttgaggacgaagtaggttttatccgcgttgaacaccttcgcagcgaacttctgcgcgtgcttggccgatccttcgtggatcagcagatcgcctaatttcacatcggcgttgcacatgtcggcgcgaaagacattttcgccaaaaaagtcatagaactgacggcctgcagggtgctttttgaaaaacgccccgtgctgatgccccggacaggcaaaggtgctgttatccatctcgacgtactgggtcagggtattgaaaaacggcggcagtagacgcgcttcataatcacaggccgccgcctccagctccagccactcctgatctttaccggcgatcaccgcctgcaccccctccggcttgtcgaccgccgtctcactcagcaggtagaccggcaggttaaatccgctacgcctgaggagagtaaggatgccgctgcgactgtcggccacggagatgacgactgccgccacatcggtaaaatcggtactgtccagcgccacaacgcgacggtgggtggacaagcgggtgaccagctcgcagctggcggcaatgtgcatggatttcataagcgcaaatgcccgtatcgggagtgtaaaaatctcagacaagggagaccttgcccaacgatgtgtccgggtctgacggattcagctccgaccgccggacatcagtaaaagcagacgcgtccgatcttactgttgccctacagtgagcatacgtgtccttcaccgcatggtgaacagaggggtaagcgtagcaagatgaggcagcccgcgcatctgggcgcggcgtcgctggcgagataatggctgtgtcgtcatcggcggcctcatatcagggaggagaaaattcgcgcaatcatggcacctttcccgaacaggcgcaagatgaaaaccgtatgcacttatatcacggatacacaagctttcccggtaagttaacgccataataatgcggttatcagggatttttaacaggagtcagcgtggttacaggaccttttattaacgccagcgcggtgctggtcggcggtgtgctgggcgccttactcagccaacggttgccggaacggatccgcaccgcaatgacctctatttttggcctggcgtcattgggcatcggcattttactggtcattaagtgcgccaatctgccggtgatggtgctgtcgaccctggtagggacgctgctcggcgaaatatgcaatatggaaaaaggcatcaatacgctggtcagtaaactccagcagttgatgtcagcgaaaggcaagaaaaaggcttcggctcatgagtcttatattcagagctatgtggcgattatcgtcctgttctgcgccagcggcaccggcgtcttcggcgccatgcgcgaagggatgaccggcgacgccagcattctgattgccaaagcgtttctcgactttttcaccgccaccatcttcgcctgcaccctgggcattgccgtcgccgccatcagcgtaccgatgctgcttatccagctgactcttgcagcctgcgcggcgatcattatgccgcttaccacgccgatgatgctggcggatttcagcgccgtcggcggcatgctgctggtggccaccgggctgcgcatctgcgggataaaaatgtttgccgtagtgaatatgctgcctgcgctggtgctggcgatgccgatttccgcggcctggacgctgttttttgcctgaaaacgcgtgcttttagcgcaatgtggtgatagattgttcagtctgctgcaaaacagataaatttcgttgacgaggcgcggcgattacggtttaatgcgccccgttgcccggatagctcagtcggtagagcaggggattgaaaatccccgtgtccttggttcgattccgagtccgggcaccacttacacagtaccgttcggctagcttcatgtgtacaaggcatgaaatagcggggcgaaatcagatgtgaggacagagtttagacagcgatgaatgtcatcacctgttgaacttgattgttccactctgtgcgaaaccctattcagcccacctgaatagggtttttcgctttaggcgatgttacagtttttagtgaaactgtcaatatgcgccatttttcaccatcttaactcctgctccagcgtcgccttcaggctttcgatattcacctccacatattccagcgttgacgccagactaacgtgccccagcaaggttttcaccgtttgcagattacgttccggcgtacgcatcagctttgtcgcgatggtatgacggaaacgatgagggctaaccagaaaaccacactcccgggacaaccgacggaaaaaggaccgtagaggaactttcgtcataccatcctgataatttgcctttctcctgaaatcaaaccaggcgatgttaaatagctgctcatgtggcattgcccccgcttttgtcacctgactgaccaactcctcaagcgatggacgcagggcggagataatcggcacctgatgttcacggtgatttttagccccctcaagccgtaagtgaatgcagtgcgaatcaaaatcgacatcgctaattctgatatgtaagaactgattctggcgtatggccgtatagcgcaagatatccagcacggcagtccagaaccatgctggagccaatgcattacgataacgatcgccggattgctcccttcccctctgctgctgcataacccgatagaccgtttcaagctgactgtcagaaagtgtttttttacgtttaacgcccgggcaagccacaacgccattaaacgggttctcttcctggaatagttttttcttgatagcaaagttgaacaacgcacgcatatgggcaaccttgttattccaggtacgaaccttcagcccctgcacttttaatacttcttctttccacctcagcaccaaatcggcactgacctccccaggtaatactttcgcaaacttcgtaaacgttcttactaccttgcaataactccactgcgtgtcaggccgtaatgttttagcgtaaaaatacttctccagaagaacttcaaatgttaacaattcatccatagtcaatttcgtcccattagttcaaagagctaacttctaataacggggtatctgctggcactgttgctgcgccataaatttctttcgcaggtacaagatagccgtgataaaccttctggctctccctattacggcactggtatacatttgctcccccgcgctgccgcctgtgcagatttattttttcaaactggcgctgaacatcacgccagttgtctatttttaatggtcgcagtgcctccctctgttccgccataaacctatgaaaaattgacggagttttcaggaatacagcccccgcgatcacatatacgtgaccatccggctcattggctatcgtttttttctgctgtatagattgtctgagccagtcaataaacaactcaccagcaggatgaaagcggcacaatgccggttcagaagaaagatcggctccttccacattctccataaaagacggtaaatcatcgggaatattttcaacatattcacagggcggcggtgcctgttgtaagaaagtggcgtaatcgtcaaaagctgaatcaggacaagcttctggcaacgcggatggtgtgactggcggcgttttatcgctgccctccccggcttgtaaaactattgcccctactacgcctgattgcgcccgatacccggcaagaaacatcgaaagcgcctttaacgcgtcgggccatcgaatcagccaacgcagcccctcttccggcagcagcctgaaagccagcatggcgctgtggccatataccttttccggctgagtttctggcacaaagcggaagcggtagggtttatccagaacgcctgcaaccggcgaccagacctgcccgttctcctgttcaacgtggagatgcgccaaattgtccaacacgctaaacatggtcgcccagacaataaccgcagaccacgcagccccctgcgtcgcctgatcttcagggtcagcacccggcggcaacatgtagctttttgacagtttcaccgcgtttgccagcgttttaagaaaacaatcgaccatcccaccggggtacgcatacgccccctgctccgctaccggaaactgctgcattagtagtacacactgctccagaggagtcaggtaatactgctgatacaggtttctgggcagagaagagtaatcccacagcgtttgcagatattgctgacgtagaggtgtgcccaacaactcctctacgctggccggagcaaaataacccgcaggcacaggtgaacggttatcggataagggttccggcggatgcgccttgtcacgccagaaaaatagagtattgagcataaataccgccgatggctgaaatgaaaagctgccactctatttctccgcccataaacaacaacaaacaactctgtttaggttcctaataatttccaaatcccataaaaaatgctcccgaaggagcatttagcgcatcaggccactgaacggcgcacatcctgagcaaggttaagtaaaaattcacaggcctcgcgcgcctgacggctggcccggaaaatagcgtgtttgtcctctttcagcgtcttcagccatgaggcaaagtagctttcatgttgcacctcaccataaacgcccagttcggcacagagaaaagcgctacccagctctgcgataagctcttcaaacgcataaatcggatcgccaaaccgactcaatgaagacgtgatgccctcgcggtttagccgtttggcatggccgctggcgtgaaccagctcatgcaacaatgtcgcccaataatcagcatcagaaaaaaactgaccgactgctggtaatacaatctcatcggtggatggacggtaaaatgcccggttctggctaaacgatgtagcctttacgccggaggcattcagcatatcaagaatgcgattaaacaccggcgtactgacggtatccacatcctcctgcgacaaaggaacggcagtcaccccaacgacggattctggtaaactatcgcactgttcaacgttgaacaggtacagcgatttagccataacccgggattccataaccggtttgccatcggcgtcaaacagcttactgccgcttttatcttccgcctgcttttcaaacggtttgaagataacgccgagactgctgctttcacctttacgaacctgcccaccgactgcctgcgcctgcttataggtgagccagcgattggaacggtagcccttctcttccgctgccagccacaacagcatgatattaacgccgttgtagtgcccccccgtcgcggcattaaccggaaacgggctggaggcatatttctccaccgagcgccacggcttgcgccagggcggtacgcctttttccagcgcggcaacaatgcgatcggtcacctgttggtacaggtctgtacgctcaacgcgttgagaacgagaggtcgatttcttcatgggaaactccttttaaaaaggcgtatcccactccctatgggcgcagaaatacgccccacagggattgatgaatgtcagtcagttcaaatggcgacggcctgaataacgccttcggtcgttacccgctcgaactgcttttgcagttgcctgcatgcgataagaaaacagtgatggtcatcagcttttgcccgtttgcagccaacaacggcaacgtcaacaagcagccgctgcgccatcatgcgccagcttttcagctctttctggcttcggcaggcagtgaagtgtgcctgagccataacgtttattctgtccgtcagatgacggtactccgcgacgggtacacagttttgccagccggtaatgaacatcgccagcctctgcgccttcagcataatggacagctggtagggtttggtgatgatgtccacgatcccgccttccgtcagcggtatcctttcttcaaagctatcgccgccgaccagtatgcgggccatcgagacccattccgggtcaagatcgggatggcagccgtcagcataggccaaatgccttacccggccatcatcgcgttgttcaccgccgtcaaccatcaaataaacgccgtgatccttagccagaacgacagatttatcggtcgttatagattccgtcacgatggccttcaggtcagaaccataaaaacgcagcatagatatctcctcaataattgccggagacagcttccccggggagagaagctccctccggggaagtaagttcagtaaaaagaagtgaaacggattatgcgaaggctataaatatcctatcgcttccagtgccagagagcactttgcatctgcgttcccggtatagaaataatgagcccaggcttccctgttcaccttctctccaagcgccagaacgtcatgtaataacggttcactggctgaatgagtaaaacggccaaaaactaaagcctgcgccagctgataagcaatgtcggtaaggacatattcgttatcggtaaaaccgtcctcatcgcgttcctcatcaattcctaaacgcattttggcggcaacggataacagctccccctctgcattggctaagtcataaagatcctgaacaacaggctgtggctcaaacgataacgcgatcatggtgttctccttgcgatgtcataccgaaaggagaacgcccccgaaggagtggttcctttcgggcagcgtttattacgttaacggtcagtaataacctttagtcaatggccgccataatggcgttagtacatgaatgcattaaggcgtaattgcgcaacgcataataggtttcgatgtcctcatcggcttcagtacggttcgccagctcgcagagagcgtaaagcgaagccgtaataccaaacgtgtcggagtccatcgtgccctgatagtaattttccgccgatatgctccagttctgagacgtggccggataagcataaaagccgccgttggataacttcatccccagccaaagcccgccctgatactcgcagcttagccggtctgcccagcggtaaagtaattgttcaaaacaaaacagacgtaccgcctgttcttcatcgttctgatcgagcaggcgatcaaaatcgacctgtgtgatagtgaaatctgtcattgatgggtatctccctgaataaagcggagggagaacacgcctggagggtgttttccctccgggatgatgaaaagagttagtgtcaggcggtggctaatgacaccataaggcagcagccaacgcgcttaaccgtaaatttctcgatgtgtgcagtgacgcttcccccagtacgagtaaaaacgatcagctggaacgtcacctgccccgtttcactgttctgccgatgctcccagacgttcagcgcttccttaaccaaccggttttggctggcgatagcgctttcaacagagctggaaaagtcgaccgcagcttcccaggcgggagacgtaatcgagatggataacatttcataggtgttcatctgtgttccttacagtaaaaagggaacacgtccccaacgggaaaatgttcccattgggtgagtagaatgcactaaccacgcttattcattgcgtaagcgacgttcagtgcaggaatgagcctgaaaaggcgtaggtattaagaagagtaccttcaccgcagtttgcggcatccgtttacaaaggctaaatggatttgggtttgaccgccgtaagcgccaccttgcaggtcgtggaggctttgggtgttgtcagagacaacgattaggcgttacgattctaaaccagtcatgtataaaaaaacaacaagcagctatgtggtgagttataaaaagggacaagtgagatggaaaattctattagctttatggcaagagatggcgttatttctttagatacgtttcttaaaacacgtaaatttaagaatggaatgggcatcatatttctcgacagaaacgtcgtgagccctgtaaccagtaatagtttaaaagacaaattctcatcattaaagcattaccgtttctctgtcattctttcggcaatggaaggaaagaacaagcgattaccgacccatgaagaatatattgaagaatatcaaaaatcatccgagaagataggactagcattcggggaggatcgggtagacagggaaaagatagaatctttttattatgcagtgaaaggcgagtatgaatcacacattaatgccgaatataaattcctcgcgcaatccattgagattctaaaagataaaaccctaactgaaaaagcagagaaaatcatagaactaacgcacagcatttcaaaagagcacccatcaaagatgaacccgcttctgatattgcttgtattttgtcatttatacaaaggacgcggaagacatttcatagacaaactgttaaaagttaacaagcaagaacctttagaacaaaagcttcataatgttatcagcgacctaatgatcattacattagttctaatatctattagcagcgagaagaaatatattgcagaagctgatgccaataatggtaaggtaaaacatccagacggtagttctgtaacactaaattttaaacatcgctttgtattctgtagtgctgacgctgcattactcgaattttatatgttgtatatagaactgcatgaacacttacatgttatatttcgacatcaaaaaagaatattaaatggcgcaatagagccaagattacatagcgtttgtgccaaattattcccgggagcgaccaaggaagaggcagcaaaattactcaatgaaatacactcgtatattttataaaaggctaatcgtcatgaggctctcctttgttataaactcgcgccacataatgcccgcgcccgtccccgtgccccaaatccatagaaaccaacgcttcggcttcctttttgctaaaacctctctgcatatgatattccgtcgcctcgcgggaataggcatagcgcaaactatgcggagaaatctttcccgttagccctgcgtccttaacgatattccgatagcgatcgatggcggaatggagattgggtttatcgaccagcttgccgttattattcattgctattttaagcgcatgattcacggcctgaagcgttttctcacgatcgacaaccgtcgtatctctgggcttgccgcctttggtgccaaaaacaactcgtacgcgctcatcgccgcgtaataaggcctgctgccaggtacgcaatgacttggctgactgcacggcctcttccgttcttaaccccaggcagcgggaaagctgcaccgcagccgcgacgccttcatccttgatcttaattacagaaaatacggcctgataacgctcgtcggaaatagccaccttcgttccgtcacgactggccccggacaacccaagcgcgctattgcttaaacactcatgggcgggatcggccagtttcgaccttccggctacgttaaatatcgcccgtagcgccgccatttcattctgcaacgtgcgctttgaaatgctttccgccagacggctgcgaatatacagctcaacgtgatgagttttaatatgcctgacgtcccggatctgaatattcagattcagcattctctccgccatgcgatcggcgattttcattctgtcagccacggttttaaaactgcccccggcctgccgggccaacgtcgacaggcttttactcaatttagacatcaagacctctggttataaacacgtactccctgtcaggcttacctttgccttgcgtgagcaaaggtaagccccaaccgttttaaagctgtgcatctcaaccccgacgacacggttaattttgcgcatcctgcggctcgactggtatctgtgcatcggggcggcgaaatgttgagttcttacgaggctccccagctctctgagctgctcgtggctaacgccatgctgactactgtcaggccgcctccattgccagtttctgctggcactgccgtcgataccgagtcgatctttctccttttttagtggtggacgttttcaaacgggttcggcccgtttttaacgtcgattgatgaaaaaacatcctgattattccccttaaggcacattcgccaaccggtactacgtgtcggtcagagcgtagaggatgttgttaaaggccgaatagtctgggcccgtgggttgcgcgctgcgcgcgtcacttggtatcgctaacgctctgacacaagtgacgccgcgcaaccttctgccgctaaatgcctgccgtagcagatgccaaatgttccaaatggcatagcagacgacacgcaaacgttggcaacgatagctggctaaatgaataacactcattgcctggaggatgagcttttcagctcgaaaaagagaacgccgtggaggcgctgatatgaagagagtgccttaatcgcgggtagcgacgctcgttggcaaaggctaaacgggcttgggtttgaccgctatttcagcgctaccttacaggtcatggtggctttgggtgttgcctgtagcaacgttacagcgtttttatactagccgttatttttattgccaacaagacactttttagttattcataatatttataatttacatttgaaaggatgcattatgacagataacacaaccgaagaattaaaagaaattttccagaaaatcagtaagaaagtcgttaaactaattccttacctgacaattttgtcaggcttaatggtatggagttatttaaataacatcggcagactagatttactgatagattccttttccattaatatcggattagtatctttattaatatccgctgtagtattatctctcgcaatagccataacactcatcctacccagttcgatactcatttttcactcctcaatgtttcctaatataattaacaaaccaatatctataccatggttaggttgggggttttctactttattcttgatgttaacatttcttccacacattccatctataacaaaaataatatcaccaccttcagcatcattaatctttatcataatagcagtaatatcatttatcattttcttggttatttcatggtacagtggtgatttcaaaaacaacgatttatttaaaatagctaaaaatgtcggtaaagcactaatagaaacatttactacagtattcgccacattatcaattgccatccccattacatttttattaaaagacagcactggggaaaaaaccacatcactactcatagcactggctttcatgatcgcatttgctctatcatcttttcttcccgcaatagtttattatcgcaatataaaaaacacatcatcaaacaatgaaagcaaaagcatcattccattagcaaaaaacttatctatagcagtcattataacgataactatcacgtcccttctgttccccaatgtaacgactaccttaatgaatagctctctttactctatcggagtcattgataataaaaatcattattttctaatagatggagaaaaatacaagccagatatgttcccacagaatacatggaagacgtcgacaaccgataaaatcggaccagacttctttatctacgggataagaatgttctccgccgggaataaaaatttgatttgtccagatagcgttggttccttcaaaagggaaattaatggaacaaactatgatttaatcacttcctctgataatgaagataacgcaaaaaaactaaaagatatgaccaagatctgtgtcgttttagacagcgacaatgcacaacaatgggatacttttttcgaaaataacgttcaaaacaaaggataagaattgtctgcctgtagccagaattattattctggctttacttttttcggctacgattcagttttaaaaccctgataaagagccaacaccgcttcagcaaactcatcatcaacggtataaaaatagcactctggcacatccagcacttttgcaaaactacaaaccagctcaaatgaaggcttgtgcgttccgctttcataatgggacaaacgtgaatatgccgtagcctcttcaatcccagccattacacctaacttttcctgagttagcccagcgcgtaatctggcatccttcaaacgtttaggaatcatattgttaccatcaatcaatatattgacagtatctttagcattccttaagattaattatctttagagttactaaagatggattcgcatactggagataaaaccatggaaaacaacgactggcatccggcagacatcatcgccgggctaagaaagaagggaacatcgcttgccgcagtttcacgcagcgcaggcctgtcgagttccacactggcaaacgcgctgctccgcccgtggccgaaaggcgaaaagcttattgccgatgcgctgagcatctcaccggaaataatctggcccagccgctattttgacagtgaaggcaaactactcgcgcgccagataaggagtggaagaaccaacaaataacgtaagaattattagccaataacacagtacaccgccctcctctgcatctaccccgttcatcaacatgcagacgttgaacgaaacgataccgcagaataagatgtcagctggtttataaacgaacagcatggatggctcgaatgaaaggaacggtgaagtggtttagtcaggaaaagggatatggctttattaccgcagaaggtaatcaggattatttctttggcgtcagagatgttatcggcgctgttctgcccgccactggctctcaggtcacatttaccccggccaccggacccaaagggccaaaagcgattgaaatcaccattctttcgcagcctgagcacaccgctccggataacaaaatcaagtgcccccactgcgcccgccaaataatccctcgcttagtcacctacaaaggtgaatcggaaaagtccttatgccctttctgtggcggcaccgtaaaagattttacaggcacatcaatactggatgatctcggcgatatattctggggaatgataagaaacattgccgttgccattatcgacaccgccacggccattgttattgagatcaaaaaaagtaagaaaaaatagtcttaaaccgttcgctttcaccactaatggcaactggtcgcaccgcttgtggtcaaagaggtaaaagcacttccaccatcagagcggcgcgacctttaccagaatcttttgtagcagcggagccggttcaatccccagcagccccgcgatataggcaaactcaatcacatctaaccttctttcgccactttccaccttggcaacaaaagattgtgggcgtttcaacgcctgcgccagtctttcctgagtaatgcctttctttattcttatctcgcgaagattctttataacaagttgatattcagatgaatatattgatgacatggcagctattccgcgttatatcccaaaatcgaatatccgccatttacatgattatcccaaaacaggataatcagtaactcgataacgttacggaacgaagaacatggacttacaagactggcatccggcggacatcatcgccgggctcaaaaagaaaggaacatcacttgccgccgtttcacgaagtgcaggcctgtctagctccacgctggcaaacgcgctgctccgcccgtggccgaaaggcgagaagcttattgccgatgcgatgggcatctcaccggaaataatctggcccagccgttattttgatgaggtcggaaatcccgttcatcgccacacgcgttcaaaaatctgaccatccttacaccgttacccacaaccccacaatcgccatcgtcgttctggcgaacgacgaccgctgccactcaccggcccctttgatggtggccggttcgctggcttagtctcatgtggatttgtggataacggacggcctgtgaatgtggcgacttgttgaacaatagcaccccgtgcgttagcatcggacaatatcacggccataaatcagggatggatttgatgagtgaagaaaagtttaacccgcaggatattgaagagatcctctctcgcccgccgtcttccgacagccacaaagtcaagaaaggcgatattcccgaaatcgccaaaagcatcggcattggggccatagaaatcgtcaaagcgcttccgattcttgcgttcggcgcgctgtctatttccactaagcacaccccgataacaaaagcaggctatcgggatggctcggaaggatatggctattatgatgaaacaggtctgaggaatcgtacttttgaccccagccaatcagacgataaataaccagaagcaccctgaataatgaacaggtacttctggccgacggttatttcatcatcgattttccctttgtcatcgcagctccggcgacgtctgacgcaacctcgccccctttttctcctgctgattgcgccttacctgcgcctttttgcagcgaccccgccacttcaccaccgaccttaattcccgcccaactcagcgcaccaatccagaacgccggaaacaccagatacatcgttcccatcaccaggttcatcacccagccgtccgtcgttgaaccggcaaagtcagcaaaaggcaccgggttcccgccgtcgacattatccagcccgctgtagacgatgtcgatcaggcggtcatccagccagcccgcaaactcccaccagaacgtcaggaacatcagggcaaacatggcgaacgacaccgtcaccacagccttgggcgaatagacgctgaacatcagcaccagaggaatgacaatcaccagcgccatctccagcagcgcctgcaccatcggcagggtatatttgagaatatcgaatccgggcagcgccaccacctgcccggcagcgacgcccaggcttcccagcgcgctggacacaaagctgaatgtacccgccgaggcgttattccccatcatataggtttcgccgtcgccggagagcgaggcatttttcgggctgaccacccagcgcaacgcgatctcttcccactcgttgccaaacttcttctttagcgcgcgagtcgtgatgtcattgtagctggacatcacccgcgtcttcagaccgacggtcggagtgttccaccactgcttacaggtagggtaaccgccccgccctacgtcgggataaccatcatcccgattcgcatcgtagggccactgcgaacgcggtttggtggaggtgtaatagtcgtaataccctgacgtcgaaagaaagtagtcagagccaatccagccgacggaattaatggtcgcgtccgaaagctgggcgttggtcgacttcagccggaaataggctttggcatagcactgattagcgaagtcctgcacctcttccagcaggatcggatcctttatctgcgtgtgctgcacgtcgaaacgtagctgacgcaggttatcaccgcagggaataccggcgatcgtcgcgtgcgttacgccttttgacaggctgtggatcatgtaccaccacaccggtaccatggccgttttaccgtcaaagtcattaatcagcgtggcatagcccgacttctgggggagcgggatgttcacgccgcactgggcgctgcgttccttattgaacttgatggtgttgacatccacattaacgaccggcgtcacgcaaaacatcagcacaacgaaggccacgtaaataacgtgctcgatgcgcaccagcgccagcgtgcccttattgccctcatcgtccccctcttcgcgagttcgtaaccaggtcgccaccactttacccgcaataggcaacgcaaacaggccggttgaaagcagcgttttccagatggcgttattcaggatccagcccagtaggatgaggaagtactccagatagctgtcggcactcatcgtcagctccccgcgtaaatattcagttcaaccatgagcgtcatccccgccatcaaccactcgatgcggcgaacggcggcaaggttgccggtttgctgaagcaaccagaggcgcacccgctgaaaccacagcccggcgatcagcccatacaacgccaatcgccagaccagcagccagggggcggcgtcatccagccagacgcgaaacgccgtcaggcttccggcatagcgaacgcccagccaactgatccctaacgccagagcgagcgagccgacgatggccagtaacactttcccgctcaggcgaatgctgcgccagagtatctttcttccggaaaccatcatggcgccacctccgtccccagctgctgtacggcttcatcggcatcgggatttttttggcgggcgctgttctcaaggccgcgctgggtctgtcgcgacagcgctgtaacaatggtgttgttgctgatctgcttgcgcagctccatctcgttcttcagcgccacaatttcccggtccagaaactccagccggcgctcggcttccgtcagcgcttcctgctgctccgcaacgtgaggttccgactgcccggcggtcagcatccggcgcataccgaacgcggtcgccaccgtatccgccatcgccagctcgcttgccagacgttgcaccagagcggtgttgtccgggtcatcctttagcgcctgaacaacgccgcgcgtcaccgtgaggtcgccggttttcagcttcgccagattagccgcattgaccggcaatgaaccgttcaccagctcgaccagaacctcgtaattcttctgggttgtctcatcgagcatcggcgtgaagccggttcccggcgtcgtggtgccgggttcgttctccagcccgccgctggcgcactcattgccggatttacaggtgcgaatagagcgatcgcctaacacgctggcgaccacctgagccgcttcatcgccgtttttatatttgcggcacagcgcgccgttacaggcgctttcactaatggatgcgctgctgtccgccgcctgcttattgaggatgttgtacccggccctggcaatatcgtgcgttggccggatcgcggcctgccctttaccgccacgctttttgccgccgacccaggagacgccctcggttcccgttgatttgctcagttgctgatcggccttcaccgcgtcgctcgtcccactcagggcgttctgatactcctccccaacggcggcctgcacccacggcccggacagggtgtgatccgccagcttcttcgacatggcctgacagttcaactgcgccttatcaaagtaagcgttggcctgaagcgtgccgttggttaacagctcgtacaggccgggattggcgcgctggataaccatcgcgggcaggctggcgaccgcgccggtcgcactgctgatcacgtcccccatcatgtctttaaagccgctggtcaggccgttgagctgattttttaccgtggttttgacgtcaaaatttccacacatcaggtcggcattccagccaacgcccatgccaattttattcagccggttgccgctgggcgggttggacaccaccgtcccgccgccgatggcgtaatagagatcgtcgttaataccgccctgcacctgacgactggtgtcattgcctgagctgttcatggaaaacgccggtaaatccaccgcgctggctgaagcgctgcacagcaccaggctggcgagaaacatgcgttgaaacatcgtcattctgatcatggtcactccctgaggttaatagccaccaatatcggtgctgaaaagaaacgtctggccgcgctttttgcagcaggcaaagggctgccacagcgcccaagcatagttgccgtcttcggcataggaaaacgcgcggtcgggaaacgcggcgcaggacatggacaccttcggagcgaggcgctgccacttatggttgcgggtgccggtgttttccgtcaccggatcgggcggccagtagccagcggaagcgttggccttcagcgtccgataaacgtggatctgcccggggcgggtaatgatgtctgccgcacgttgagccgtcacggcagcggccttatagtcgtccgtctgtgtgacaaagccggaacggggatagacgttgccccacatgttcccggcagtggttgcgccgatttcccgccgccccggggtgagcgcctccgggtaaacactttccggcaaaccggtgcgccacatcagcgcatccagattgctcaggaaatacggctgccaagcggtggcggctcccttgcaggaatagccggaggtctgctgaccgataaggctggcggcgggatggccgatcgcgtccacgctgcggtagcgcacattgtctttacgctggccgcgcttttgctgattctcaccgccaccgtcagccagcccgcctaatgcgctgcggctcagcatcgcgacctcacgccacgggttatcgcccggctggcgataggccgacaccaccacctgcgggataaagtgacgtacttttaccgacgtcttgacgctgcaaccaaacggggtacacagcagccagtaacaaacacccactacccgatagtcaatgcagtccgggcacgcggcgctggcgacaagttggggcgtggtcagcgaggcggatgcgggtacggcgcttcccgccatcagcagcgcggccagtggataagcaaaccgatgcttcatggcctgctccctgcgcgcagcgccgccgcacgctgaatatccgtggtgccgtacaccacatcgcgatcgtcaaacaccacggcgggcaccttgcgaatgtccagttgccaggccttcagtacgccctgccaggcatcgacgatccgcgcctgctgacgtgcccagttcggcgactgaggcaacacctttgcctgccgctccgctttgtcgggctcaagcgccagattgccgaaaatctgctgctgcgccgtgtccggcgcatccagccagaccaccgtgacctgcggatcgttatctagcggagggtgatggcggtcggtgtacaaaaccacgtcggcacaggcctgcccggccagcaccagtgatgcaattatgatgagtagtcgttgcataacgcactcctgtgtggggaaagcgacagggtgcgttggggtgggataaaaggcagtaaagaactgttaattgggttttgaagatttttctctcatggggttaaaatattaactatattagctttgaagatattttcttactgccaagtactcttttacacgaccatcccacaaagatgaagacttttgcatggaattaatcaagtcgtcgaataagtaatctctattttcaacaatcacttttctgtcagaaattccttctggagataattgatgaagatgcatcataacattaaatttttgagaactcgttgccgcatcattatcagaacaactatcaataatcgacgttattgatacatttttattacaacagacctcaatcataaactcgaactcatcgattgtcatatagtatattctgtttttgttgataggtaattcaccatatttattttcaaacataccaaaaaatgaaccatccagcacatcctctatcatcttacctgtaggaatataatgatccatgtgtgtgataataatcaaagagtcctttatacatttttcttttttatctatttcattcatattataagcacaatccataccttgaatcacacctttaatgaaactatttgccaacctttccttgatagatttagcagaattggagtgctttattattttatcaggctctatcgctttggaatcaatataaacagtacctacatcctctctaacaataaaatcgacagtttttgactgtacttcattttgtttatagatgctgataatttccttttcggaaataatttttgatggtaattcgtttaatatcgaaccaatatatgactccattactttcgcaaatctatctttataactggaaccatgtttatcttttaataaagttggaaccaaagaggacagagatgctctcaggagatgtttgcttaatatgattaatccttcatctatcaaaataaaaggtttcatcatcattggcgggtcaaggtagtattcactttctcgttgttttatatctttgaaccctgacataaaccctctcagttcattccatttcactgaaactaagtctaggtatttcttcacaatatcagtaccaaacattggaattaaatgtattaaatacaacctaactggaatgtattccgactctttaccattatcaatacatgacatcattgcaaaataagcacttattttataataagattccaatgttattccatgcgtttcctggaaaaccttatcaaaatagccaccatcataattacaataccaatagtattgtcttgctagtgtatttaactctagtttcataggagcttgatacagctgttgattaatgatcatacgcctgagactaagcagtaccttcttatcatcaaaaaaaccagaaacctcattctgaagattatatatcctattaacaatatcgatgaaatctcttttattcattggagatacatttcgtttaagcggttccgataatttccattttaatgctaagaagcaacaccatgggaaattagaagaaatcccaagttctggttttaaaatggtttgaaaatgatcgtacatcatcgttataaaagaagcgtcatcataacctgatagcttcttttttattgccacaaccttaccattataatcttttcttactttaactctggggaaggctttaagtgccatgtattattaccttattaatataatgattgatttttttgtgcgatcactcaaaattaaggttatttcaacatcattcaaaaccaaattttaaattgacaaaaatcgcactacactgcacttacctatacacttaaaatacctaatataaatcaatttaaatcaatgtatcggcactcgattaaagagtaccgatataataaaaatcacctatgtttatacagagaagatttttgatttttcctaatttttttaccattgaactgttgtttatagcgatcatgtatacgacgcaaacgcaattttatatgaccatccgaagatacctttgctccagtcattgacatgatcgctttcactgtcaaaaattgttcctcttcatcatcacatacgtatattaatgaatccagatttccaggtttgataaaatcctctatcaaagctttatatttatcataaagagttgcataatcctctttttcagaaagcctctcaacatatttttttagctttggtgtttttatatcatcaatattttgggcgcaaacctcaccatatgattccgctaattccttgactttattaattaaactgattatatctctggtaggaataatgggttttagtcgaccaatagtatcgggagtccattcatagaaagtgataacttcttcctcaccatcttttttgatagttctttgtatttcagtaccaacatctacattaataatccagttttgatttctctgggcatcatctataaatcgtaaaacagaattagggaatgatttataaaaactatcaagaatctttcttgcagaaataagattagtcctgagacatgcaacttcattagggtaatctttttcaccaaaaatatatccgcgaagtttttctacagctaatctccgttcaatctcactttcaactctttttttctctaacctaaatgaattatctgctttaaaatattctgaagcgcaatgccctcctataagggcttccactccatcattagttattccaagccagccatttttgtgtttttgatggcaaattcctttttttgtgcgaacctgacaaatcacattctcatcaaaacgatacattcctaccagtgatttaaaattatctggactaatttcttgctcagaattgaaagatgcccgcttttctatctcgttatagctagaaaaatatatagccttttctgccatatgcactccttagccaatttatgtacagttcaaaaataaaccacacacggagtaatggcaagcagattcgtccacttattcactaataactacctgatatctatagtaaccagtaagtgttttcttcgcgatcgttcgtcatggaaaactgcccgcccataggcgagcagttacgattccagtcaacacggcatttcgtggggcgttacccctcaacctctcctttgagcccgatgaaggcctgctttatctgctgaagttgcttacgcagctcatgtatttcgtcgttatcagggataagcacaatgcagtctccggcaatcttcacagtaacgccggttccggtttcaaaaccggcgtccttaagccattttccgctcaggtgtagagaaggtgtgctggcatcgccccgaccgggaagatagccgacggtgtagcgccgctgggttttaacaggtttttcggatgacaggtcagtttggataggggtcgtagccataaggcaacctccagtgagtagcaagttattcccaccactagagaggtcaatctcattggcggtggaaccggacgaggttgaccttaccggcctcactgacaccggcgcgtctcgcgacgcccccgtccggcccaccattgagatgtagcagaacgcacggcacaaaaaagcgcagacgcgccttgtgtcgtcagtgaagtgtttcaggaggtcaatcccgtcatctgattttgcagatgcatgggaaagatactgcgatcgctgacgggcggcaagaggttttatctgaaggaagatcgcagaaatgaaatgtttcaatgtcaataagttacaggaatggtaagaagaaagccaacatacaagtaactgggataattacgggtatatgctaacaaaaacaaattgatttataacaaaggctttctcgtatctatatcaaactacaacgtcaatttttatctataaattgttgtaacttagtaaaaagcacagtaagttcattacgtgaacattatcaatgtccggaaaccctatgtttaaaaacggatttttcggcccaatgaacgccaaaactcaagaaggaatgggtatgtcagacttaccaaagaatatccaagttatatttgataacaacccaatgctcaaggaactaatcccgaatccagttttggcctcaggatcatcttttatcgttgcttttaatgataaactagcactgagcacaaaaaactctgaaaaagacgatatttataaagttgtctttaagaaagattcatctcgagatttaatggccattaatagtggcgaattaaagggattgctcactactacttgtatagagaaaggtaaaattagtgatgtggcaggtttagaaaaaatagaaatagataataaaaatgaacttatgcccacattgttaggcataagtctttatagttctattcaagccagtctatcctatatatctcaactctttactgatataagaaaccaccaaattatcgaggaacaagccagatttgaaagaatttctgaaacaatagtagatagttttagaagcatacctgatatttcattagatcgttcgatgagggatgtttatttaacgcgaatcgttaaaaacaatgacgattgttttgaactgtatgcttcacaaagaatacaattcgcaaagcttttgcaatcagagccagaatactattctaccggttacaaccattattacaatagcaacaacggccaacgattttatcctgatcgtttttttataaataacgtattaacacatcctgtattcgcagtctttgaacgattagtcgctggcagaatttgtgaaattgttattagcggtaacttttccgatagcaatattcaaagacacaaagatttcatatatagaatccaaaccaagctagaagaacttatgaaataccggttatgtgctttcgaacgcttcactatggaacaaaaaaacatcatcgatgaagatttaaatttaactggccatgaccgaaaagaattagaaaaaaacctagccgaacacattaatttcgttaaagaaattaatgagaaaatattttcactattaaaaaacaagcttgatggatttaacgtactaacacaccttatggatcaagatgagataactatatatatccttgatggaaaattattaataaataacttcaagtcaaccccaaattaaagaagtaagtaaaaatctcttattgttgttagtttatcaatggagtgctgttatggaaaaaatagtaataaaaaacttagatataaaaagattcaatgcattagctgcacagtcaagaagccctgcagcagcatacatgagtgaggaacttgaatggtacgcagattccgacgaaattgtattgggtattgttctcagagacacaatagatagcgattttgttggaattattttagggagagatgagggggacaggttccgcgctttcgatgttaaggcatcaataccaacccaagaagaagcaagagtttgggtacatggtggtatcaaatggtatgctggaaaaggggagagaacgttccctcagggcgatgaaagcaaaggtttagatttatttactcctgtagttccagtagcaaagcaacatccatactttgccaaattagcccaagaagattcttttataccagccaaggcaataataaatcaattaatgccccattatactgatattgatggtaattttgttgagcagtttcaaagctcaggttttgacgcccgactctgggagttatacctaaatacatatctcaatgaagagcagctttttttagatagagaatatcatgccccggatttcttagttcaaaagtatggaatcaaagtagcaatcgaagcagtaattgttggtagaaaagaaagtaatccaatatctttttttcaagatgaaccaaagtttttaactccatcagagataaaggaaaagctcaaagatgaaatgcctattaaatttggtagccctctatttagcaagctcagaaaagaatactggaagcttgaccatgtaaagggaaatgcacttatattcgcaattgctgacttccatgatgatcaatctatgcaatggagctcaaatgctttgataagttatctttatggtgtaaagcatgaatttacccgagataaagatggccagctaattatctcacctttgaaaattgaaaaacatcaagtaggaaataaaactataccctctggttattttttccaggatgaagctgagaacatcagtgcggtgttattctcatcaagtggaacaatatcaaaatttaatcgcattggtcgacaggctggctatggccctgaaaatattatcatgcatcgctttggtacttgccatgatcatgatcctaacgcatttctccccaagcaatttgcttatacagttaccactaattctaacgaaacatggggtgagggattatctatgtttcacaatcctaacgctaagcatcccgtacctgaagcgctatttccatcaattgctcaccattactatgacaatggtcaaattgtcagccacttacctgaatttcatccttattcgtcaatgacaataaatatgaaaattgaggcatgattttttgataaataaccgttaccggacgcccccccacaatcaccataaagcagcaatgggttgctttatggtgaaatcatatagcacatgccatatcgaattcttattcaattcgtgttgatattgagttaaaaagcacataaaaatattattatttaaggtatttaattccactctcctatgggctatcatgggttgcagggcgttcaatgtcaatataactaacctaataggtgtttatggcaactacttgggaagattatcaagaagaagctgcatcattcttcagatctcttggtcttgaagcaacaactaatgttagagttaacggcattaggacgcaccatgacattgatgttttggttaaatcccatcatgcaggatttgatattatatggcttgtagagtgtaagcattggaaaaacccagtttcgaaacttcacgttctagctttgcgtgaaatagtcactgaaataggtgcagatcgaggaatattactgtctgaatcaggttttcaaagcggagctattgaggctgccaacctaacaaatgtccatataacatcacttgcagaattgagtttatctgccagtaaagatatatattccatgcgattgcgcgagctctataaccaagttgaaatctgtaatgaacgttattggaatatacctaaagatgagagaattaagtatggtcttcgacctgaagttggagcaattaactattcagccccccgtgtagtcgagctatgcagagatttattttctcgttcatttagaggtgtatatccctttgaatgtgaagatccagggaaatttctcttcccacacaccccccgaatttttaaatctcctgaggaagttgtaaaggctataaaacccttaatttcagaacttgaggaaaaattaaatgaatgtgagcgccagatcaacatcattaaataactactcagataacaatccggctaactttagtcttttaatcgttagcagtttcatgcattcatggtcaaaattatttttctcatatctcatagcagaacataatcgactggatgacgtttaactccgcccccaatatgagcaataataatctcctccatttacatataaattgcgagacatcttccaaattcaccaactcaatattgtgcaactcccccatcgccttatttaatacccccccacaaacaaacacacctaaccaaaaaatgatcaaacaatcagacagcgaactggccgcctttattatcgatatcgcattaagcgacagctgcgtaaaagaaatactcttatcccgtctgcgctcgacgttattagtcgagacagccagtgatgaaaccagagaatacctcgagctgatgctacaaagagtgtcagtgtgccattaaatccaccgttacgtcggcccacaccagaagacagcgtctcacgactccctcccctagcgaaggatcccccgcaattcatccatctgccgggcaacccgcttcgcggcccccaactcgctaataccgtattcattcatcaacgccctgcgctgcgccttctcctctttctccgtcatccccagcgccagatacaggctgggcggcacggcgcgaaacagcgcctcaatccggctggcgagcaccacaccctcggtatagcagtgcttcgctttattggccgacagcagcatggccttctgctcctccgtcagctttttaaagcgcgctatctgctccacctcttccggcggcatcaccaggcacagccaccactcgatcatgttgagcatctttttcgccgcattggggaagtcatcaaggttctgcgtcgccagccaaagccatgctcccagctttcgccacatcttgaccaccttcaccacgtagggagccagcaacgggttggtggtgatcatatgggcctcatcggtggcgaacacgatttcccgatcgtcgaactgatcgcgttccgccagattattgatggtgttcaccagcgaaatataggctaccgccagcggcgcttcatagccttcacgcgccagcgtgccgaggtcaatcagcgtcacgtccgcttccggccagttctcgcccgggcgattaaacagctcacccagaaagccctgcataaacacgccgagcgactcccccatattctgagcgcgtacctgccgttcggcggggcgggcgggatcgcgggcaaactgataaaacgccgactgaaggtcgccggtgatcatctgcctgccttcgtcccaggcctgttgcgccgccgccagaatggcctcacgcatcatgccgcgatcggcgcgttccagcctggcctcttccttctcctccccaccggtgatcatcaggcgggcggcgatctccagctcccccagaatgtcgcgctcctcgtcgccgtcctcttcaccgtcaacgtcgtcaatatcaatgccgtcgctaagctcgctttcactgacggggaccaccggctgctcaatcagcttgtgcgcatcagcaaacggggccagagaaatcccgcagcccggcttgatgctgattttgttcaccgtcagccccagctcaccgcagtaatcggcaaacaggccaaagctgttcccggcttcagcgatgaacaaccggggccggtggatcgccattaactgggaaaacaggctgttgagcgtggccgacttgccggagcccgtcggcccgaaaatcgccatatgggcgttcttggtacggtcattgctgttcagcggatcgaacgtgagcggcgcgccgccgcgattaaagaaggtgaatcccgggttgccggtgccggtatcccgcccgaacagcggtgacaggttcgccagatgctggacaaaggtcaggcgggtataccaatggtgcttatcccgggccgggttaaagcacatcggcatggcgcgcaggtacccattcagcggcgcaacctcgtattcgccccgggtgggctgtaaaccggcgttcagcaatactgcgttcagctcgcgctggcgcgactggagctgcggcagatccggagccgttagcaaaaacgtcatgctgccgtgatagagcttgtgccgctcgcccagaaacgacttggcaatggccgcatcttcccgcacccgggacgattccacgttttcgccaatcgcgttttttgccagatgggtaaaacgctcttccagcacgtcctgtgcctgcaccacaatggtcatgcacatcacggtgccttccggcatgaggtccatcagggcattgatgttgtcacccttgcgggtctccccggtcagatgtcccaccgcaggggggcgacgcaggcgatcgatagttaccgcccggtgaggctgttcgtcaaaccaccagacgccgttttccgcatccgagcgcggcggcgtaaaccataaggattcgctgaagtcggtcatcagcggcagtgcgttatgtgggttgtcgtgatggcgggcggtgcggtagagcacctccttttccacccactgcgggtcggggttaaaccagcgcagcagccaggcgtggatctgctccccactctggcgttccgccaccacgcccgcgccgttcagggcggaaaccagccgctcgcacacctgactcagcgccgtttcgggtgaatacggatcgcgctgggcggggtcgacatagcgatagaccaccatgcgggtacgccgctgctgaccacgccacggcgcgccggtgacggtcttatcaataaacagcccttgcggtacggcgatcccgcgcatgtggccttcaatctcccgcaggtagtcctcggtgaaggcgctcccctgcgcccagggcttgatgtaaccgcgcagcctgtccagataggcggtgacgtctgtttcatcctgacagaagaactggatcacccacgggcaagtatcccgctcgtcaaagctgtcctgaatggcgtcttcaatgacgtcacggatctcctccaggcgctccgccgtacgcccttccgaaccgaccggcagcacgtcgaacaccgcgcccaccgacacgccgtcatccagcaaaatgctctggctggacggcagatattcaacccagggcaagtagtcaatcaatggcggttcacgatggtagcgcgcttgctcatccgagattttcagcttgcccgatttcctcaacgacggtttgagtaccgccttctcttcagcctgcggcacaggtgccgccgccttttcacgcgtaaacaggctaaacatcacagcgctcccactcgttcacccggcagggcatactgcacctggctgtagaaaggaaataccgtgctgtagcccggtaccggcacgttgcctaccgtcatatgtgggaagacatacatcaccagatcgggattgggcaagcgaggaaattgctgctggatctcgctgttagcatcccggctgtagctttccgccactgccggctgcgcgttccgctcgacgtcattcaggtcgcggcgcagtacggcgcgcgcttctgcggtcatctgcggcgagccgcttttttgctgccacagatccagcatggtggaatcccccgggggaagtaattgctcttttgacgtactgcatccggccagccatagcgcggccagcagtaaatatattctgggcatcattcacctcgttcctttaatccagatgctgctgcgggccgacggccgcatcgtatttgaccctgcggccctgctcttcatagtcaatcggcagttggcgggtgatatgtaccgccacgcgcaggccgggtggcacatagatagcgtcaaacgtctggccgtagcgctggcgtacccagttggtggtttcctgcatcccgccggacaccgccttacccagcgcataggttccggcatctcccgttaacgtccgggttacgtcagtcccctccgtggaggaggtcatttccccttccgccattgcttccgccgctgccgtcgcgccggacagggcaaacagggtcggtaaataggtggaggcattggatttacgctcaccggccagacacggaacgccatgctcatccgacagccagccgatgctgccgccgctgcggtttttgttatcgctgccgtcggtcgatttagccgggctgggaacggtacgaaccgtaccgtcgctgaaaacgaaggtgatgctttgcacatcgccccgcacgcaggagagcgtccagtcgccggttgccgttcctgagacaatcgccccttccacgtcaggcaactggatgccgtttgccgtcaggttatctttgccgatcagcactttgaacgggtaagggtcggtgactttaccgtcaatcggtacccgccccagcaaggccgtcatggcctggctgcctaccagcgttgagttttccggcagcgtatacaccggcgtcgccgcgtcctcaatgccgcgctcatttttcgcgttacgcgccagttcggccttctggcgggtgatctcgttatcctccagactggagaaacggctggggaactgaagcgcgccgccggttcctgatgcggaaacgtcggccagcgtcattttgccgtcacggctcatctgcatcgcatcctgcggctcaatccagaccatgccctcgccactggccggtgcaggcggctcatctccggctcccagcccaaggccaacgggtaaatcgccgttcgccccggcagacgaaccgcctgcgccgccgttcagcagtctttccttcagctcatcgagggctttgctcaactggcgctgctcttcctttaccccttcggccttttgttccgcctctttttgcgcctttgccaccgccgcactgatgcggttatccagaccactttccccctgcgccagtctggcgttctcttccgccagcgctttattgtctcgatccagttcgacctgcttattctggatcgtccgcatccggccaaccagcgtgcgcaacgtgtcctgaggcgtatccccttccacacccaacgccttcagctcttcctgcgtcagatccgcgaccacgctatcccctgtctgcgtcgccgcaggctgtgaacgtgaaccgcaggacttcaccccaatggcaatggcgataaacagacaggcgggcaccgccatctttaacaacgtgtttgacttcacctgcatcatcgacctccctttttcgccatcaccgcactgggcaagaaggcgttttcaggccgccctgtgaaaaccagatacagcagagtggtatcctccggcgtcccctgcgcacctaaccaacggtgttgaaatgtggcgctgtaaaaacgcccctgtaagcggcgagggtcaagcaccactggcttatcgctctggttcttcagccggacggcgaccacgctgtatccgctcgcggcccatgcggcgagcgttttggtttcgacaggttccgagggcagcagagaggtgatgacggcaggcttaagggagacaggagaaataccgggcacggcctccaccgtgcgcagcggggcatacagatgctgcgccgcgtagcgcgtcagctgtaccggtaaaggcgcggagagctttacttcgccttgaccagccgcgccgttttccctttcaccgctggcgtcacgccctgacacggctcccttatggctggcgctcgccgtcgcgacttccccggagtaaaccagcctgaccggctccagcgcggcttttccgtcctgggcgctgacgtccagcaggatcagctcgccgttttccagatcctgcaactgcaagcgggtcacggggaatgcctcctccgcctgaaggtagaccgcgccgccgctgctctggatgcgcatctttccgttcagggttgcggggaagcctacccgcacgttcttatcaacaaacacaatccgctcctgcccgacgttcagcgggacaggcagtggaatgcgctcccatttcatgagctccacggcctgaacggcgcagggagccagcagcgcgaggcttaataacagtcgcttcatcaaaatatccccttcttctcaggcacatcgaccggggcggcttccaggcgctgcggcatcgcggcaaagcagtccagcgccaggccaaacgggttcagttccggattgacgtcccagcgcaccaccttcagcggatagcgaactaacgcgcgtttgaccggttcgttgtggtaatactcatcggcggtgaggtcgagccggataacccaatggtcgcgatcgacaatctccacccgatcgccgcggtaacctcgtccggggatttcatagataccgcgcacccgctcgcgcagttcgccggagaagttgcgcttgcgcgcgtcgtcctccagtaacgtctggcattccggggtcaggtaaggggaaagagacttaattctggccggataatcctgttcaccatccttcggccaactgttcaactgctgaaatacgtagaagccaaacgcgtataccgtgctgggcggcacttcccaccaggggcgggtgctgccgctgcgcaggtccggcggctgatggatagtgaggttgcgcggcgcgttcatccagcccagggccagcaccaggcacaccagaatcagcaaaacgcaggttccgcgcagcgtccagatatgcgcatcgcgggcgttaagggcatttttgaaacggctcacaggttcacctccagctgtatcaccgccctgctccgccgcagcgaccagcggcgcgacaccagaattagccggggattgcccagcccccactggacgagcgccgcttcaaggcgacgataaaggtagttttccggcttgccgcgcttgatccgcgccagcactttgccgccgaagacaatcaccagtagcggcaaaatgagggcaatcgttgggatcatgacccaggaaaaaaacaggaacggcagggagataacgatgcctgccagcgtgctgaacaacgcggtcaaacctaattcgggggtggtgaacccccggaaaacgaccggttcagcgttgagcctgtcaggcatgaactgaatcgtcgccatcgtgcccccttatccggccacgatggtggcggcttcgttggcaagccagatcacggcgacaatcagtaccacacccacggccaccatggcaccaaacttgccccaagtcgccttgccatcccggacttcggcaaacgtggacacgcagctcatcgccaccacgataaaggccacggcggcgaccactaacccgcccaacaccagaccgtcattgatataaccggcgatctttccatagaacgtgccgtcggttttcgacttcgggccttcgaccgtcggcaaatcggccagcgccggggaagagagtcctaaaaccagtgcggtacagaccgtcttcctggcgcgtaaaaaaagtgcgttcatgttattccttctcattaacttgcaaataaaaacaggctgaccaccaacaggacgacgacgcgaatgacaaacgacaggacggtcttttccgacacgttccctgcttcccagccgcgatagacggtgacaaaggcaaacgcggcccacagaaacagcacggcgaccagcgtgccgataaacagcagattgaggagattcgggtcggcgttgttggtcgaggcgcgaaacgcctgctcctgttcgtgggtcattgctccccctcgcgttggtactggccgctgatatcctgcggcagtaccggctgagcgcgggaaggctcaagataggttgagatgccgcgtttgattttcgcgatatcatcagtggcctgcgggtagtcaaaataaaagcggtgtgatgtgtgttcctgtactgcgacgaccttcgcccgctccagactggcctgaagctggtctagctgtttcatgactaacgccagttcatccttttcactgccctgcgcacagggaagcacggtgaataaggcccccgacagacaaagcgcccggactttcgtcatgcgcatataacctccttttgttgaataaacgtgcgcaaaggagattggcgaaaagcgttaccggaagctgtaaacaatcaaaacccggatttcaaaaattaatacgtcactgagcgacgcctgcggcatcgacggggctctttgccgccccggtctggcaagccagtctccccgcaggctgcgcgaaggcggcagaaagaggcgcagacgtgctattccgccgtcttcgcgcagcttggtttaatcatttacgcaaaaacaaaattagatggtcgtaaaaacgtcagggtaataagatagatagagctgctgacattaatcagggatgaaaatagtggggcttaatcttcagggatatcacgttacaatcgatcactcgcatcgccattggctcattacaacgcctgaaggaaacccaacccgtgaacgggtgggaaacctcactatttattccatgttcagaaggcaaaaagcgcccgccagccttaaccgtgaccgtaaacaacgcaagctgggcgataattgtcccttgatttatgctttgaagggaaaagaggggctgacaacggacttttccagcataaaggcattaagccagagctttaacgccatactggaagccattgctcaggcagagcctgatggttacgacctgatcgtttctatgccatccgcccacaacattagccacattgtagggaaaagattctcacgctatttcaacgcgccgcattttaaagatctgctgcggaaaattacggttgaagaggcttttattcttctcgatcgtgcgaatattgatgtaactgacgtaaagtcgcttcagtaccagctaagaagacaaaaaaatgaagtgggttatcagggcgctttttcactaaaaggtatcccaacggagcacagggccgttttcccgccgataacgatcaataccgctttaacgatgcatctcaacgcacacagaatattaattacggatgatctgctggcgaccggaacaacgctggaaaccgcagctagtcttctggggacgctctgcccgggcgcatcggttcaggccgcctgtctgttcagttcgatgggtagactgactcgcggtactctcaagaaaaggaagttcaggggctgattggttgaatatcacgcggcatccgcgtatactttacaacagatgtaaagagtgtgcttgagcctccccgctctctaaatcccgatgaggcccgcgtaggcaccctggcggtggtcagctcgtaaagagtaagtaacccgccggttaggcagcggctaacccctcaacatcatatgatgttgttgtaacaggtaaagagtaccggcgaaggggagaatatcaattctcccctttgttttttggttaaaaccaaagaggctcaggccgagccctgatacatgacgattcctgcctcacccagccggtctggcgagattcgagatctattcttaagattcaacatactggtttcttcagtatttaaaagcaccagtcgatagttctgttcgatgaaagcaatgatttcctcatcggtagccccctcttcaacaatatcaattatcttttttgcaaacgcgcgttgcggcatgacgtgttcaatgcgtaataaatgtgcatcgccacgttggcgggcttcgtatgctccgatactgcattctgcggtcggcattttttttaaattattgacatgggtaagcccatatttaacgcggatacaaagaacatcaatgatgcgttccactgaatgaatagcgccgccgttatcagggaagccagcggcattagccttgtttcttgcctcaataaaaagcctcaatgcgggcagcaatgtctcaggggtatacttgccagacataggttatttcctctcagtgttcgcgccatgtgtagggtgcaggtgtctcatttataaataagttataccgacgtcattaaacttagcgttaaataatacaatcacaaatacttcttaaacgccccggtcgtcaacgaaatcaccaaccccagcagcagcgccgcaggcagcagaagaatattgggatataccgcaaacggcatcgacaggtagataacgcagggtaaacaggtcgccggtttaatccagcgcttggcgtggtgatagataaagctgctctcatacgccgcgccgtagcggcgcaaatcgcgccgaaccaggccgtccacgatgccgatcgctgccaccatcacaaacagcggcacagacagcaccaaaattgtgacccgaataagaaaaaccagcgtcacgtacaccgtcgccagcagatactcccgcagcttcaccagcagccaggccgcgccgccgtttagcgtccgggtaaagtcgttgccttgatctgcgtggggggcattcaaccagcccagaaaaccgctgtccacaaacagccactgatacgccagcgtcagccaacactctaccgtcaccaccgggtcagacagcagcaggctgcgggtgaattcttcagagaaataccggctttccgtctccatgaccgctttgctgtgcagggctccttcttcaggccagaagaaggcaatgccgacatactcaacgatcaggctgaaaatcagcgacacgagtaacatgccaactagctgccagggccagtgccagaacacgttcgatagcagccccggcggacgccggggaacctcctgctggcgtggggcagtggttgaagccccgggctgcgccatcaatgcacctccagcacttcaagctggcactgaagcaataccgtatgcgcgtcaacggtgatccaaatcccgacgctattagatgagcacatatcctcttcccggcaggcgtctattcccgcgtcatttaacgctgcgataatttcggctgctctgggcgtggtgcagacgtggtgcattaaaatctgctttgccgcgtcaggtaacagggccgggtgccctagcgcggagaccatcacggcgcaaatctggtaacgtttcattcttcctctccttctgcctcttcaatcatgcggtcgcccggcatcgcgccgcctgaccaccactcatccccggtgcggtagtttttctgcatatatccggcgatctggctgatgctctccggcataaaggcatcatcgcctgctgctggaagcggcatccttaatttccagagccgcccgccttcaagcagcgcaaacgcctgcccttttggcaaattaataacgttggcgggcgttatcagcggcgttcgcacgctgctgaccctgtcctgaacgttactggtgaagtcgctgccctgatcgggattggaaatgtcagtcacgccggaaaccagcgttttggtatacacctccacttccggcagttgtcgggtcagtagctcagcggtttccgtatggcggacccgcagcataaccagactattgaagttacccaccacctgcgccgctttggcggagttaccgattttcgcctcgatatccggcagcgtttgggtgtaggccgtgatctggatccccgcgccgccccctttattaatcagaggaatgaactcgtcccccattaattcactgaattcgtcacagtggaggctgatcggtgtgttgccgccgctctgctgcggcaggccgtcattaatgccgaacttatagatatagcccgccaccgacaccaaatcagcaaacatgctgttacctaccgccgcagccacttcaggatcggagagcgcatccaggccgacgtacaccacgccctttttgcggataacctgctgccagtcaaagatcgggcgtgggtcgttcaggtcactgtagttcggagagatgagctgcgccgtcttcccggaggtcagcttttccagcagcggcagcagcgaagccacaattttgtcgtagtacttctggtcatagcgcaccgaggaacgcagcccgtccagaaccgggtcatacacccgctttccggcgtcgctacccagcacatgttcaatcgccaccacacgcagggagcgcccttccatatgacggggaacatcacgctccgtcagcgtcgccgtcaggttttctatcgtcaaccacaggtcgggatggtgctggctcagccagctttcgcaatagtgttcaaacagatcgccggggttgttaacgtagcgctggatcagcgcgaagtccggacgttgtcccagcgcgaccagcgcccgtgcgatgatattgacaaagcgccaggcaaattctttaaacgcggcggagttccccgcatcgctgagctgcccggcgacccgactcgctacttccgaaactctgccgaaccttcccacagcattgtagcgcgcagagatatccggccagcccagatgaaagacgtgaaactcatcgccgcgcccggcgcgctggcactccgcgtacatccttttcagcaggtcggcatcccctttggggtcgaacacaatcaccacgtctccccggcgaatatcctgagtaatcagtaactcagccaggcgcgtcttccctacccgggtggtgcccaacaccagtaaatgcccgacccgctcgcgcaggtccatcagcacattggtttcatccagctcaatgccgtgcagcgccggtaaaccgcccacaggcggcagaggccttaccggattaaacgcgctctcgcttgccagtaaccggcacagggtcggaaaacgatattcctgacgttgttcaacccgccgcgccgcctgataaacccaggaagggtttacgtatctggcgacctccgggcgtaacgtatccagcaggcgctgcgtgtgccgctgctcccataaaaagccttttcccaggaacagcttcatctggctcactggcacctgacggctggtcatcacgtagcggggtaagcgccggatattacggcgatagcgaagtacccgcagcccttcgcgggtgcgcttaatcgcgaatatccccagcgctccggccatcacgtagctaacgctgggcgctaaagcaatcgcccacggcgcggtaacgcaaacatagctggcgcaggcggataccacggcggtattcagttcaaccgccggtcgcagcagggcttcaatcacatagcgatcgctcacctggttgcctcccggattggaaggcgtgtcattagcttcattgttcaattcccttttcgctgatgaataccgggtagtgttgcaaccccagccgcttcgccagatcgctgccggataccggcagcagctcgatatcaccggccagcgtttgcagctcgccaaacgccgcttcgtcctcgatattgaccactagcccaacggcccgcagctgccgcagcgattcctttcgttcatccagccaacggcgggacagcggatcgttacccaacaaaaatatcggctgcatccctggtaaaccgaggcggcgggcctctacgctgccgggcgttaattcaggcgtggatattggcaataccgatgccagtgacgcgggtgcagcgggcaatacagccgcctccggcgggtttggtgattcaaattcattgggctgattattaatgccgtcaaaataaggtgcggcaggttccccgcccaaatcggcaataacgttcagcccggcgtgcgcattgccaaacaggcaacagagtcccaaaaggtaaatgctcttcatggtgtttttctcttcggctctacccagctcaccgccgtgggctttaccgggttcagagtattcagatggcgttgaacaaccgctttatagacgcgggccggcttgccgcccgcaggatgatggtaacaaccggcggcctgcatccagcttcccggttgggcgtcgtagcattcgcgtaggatccgcgccgcgacgcgcagattggtgtaggggtcaaaggcgtgccaatacgatgaaaaccggctgccgttccagcccagattaacctgagcgacacccacatcgattcgcttcaggggatagcgccggataaaccccagcaacgcctgataggcctcatcacggctggcataacgatacccgattccggcaacgttgatggtccacggccacggacgaacgccatgggccagctttttggccgattcggtcagcgccagcgagtacagcgcttcggcaggtacgttttcctgttccgcaatctgacggtagccggatggaatcgactgtgcgcaggccaacgggggaaacaatagcaggaacatcagaacgcgacgggcaaccatccgttttccccctgttccagcaccacgggcatttggcctttgcctaacttcagccagcgaccagcgtcatggttgagcgtaatcgcccgcgtttttacgcgttcagcgggaatatgccgcctgctcgcccactcacgtaccttcgcgtcctggccttcgctaccgaccagataaatatcaaacggcttctggctggcgagcagcttcgtcagcgttttatcacagggcgggcagtccgctttgacaaacagcgccagacggccatgactccggggctgagctggcgcgctgcccatacctgcgccaatcggcagaatatgggggtaaagccgtttccacgccgcgtcgacctcccgctgaaacgccagctcggcctccacgcgcttaaagtcctgctggacggacagttcggcaaagcggcggcgctcttccgccgttctggcttcaatgcccagcgccgtaatcgggtccagatcgggagagaatacgccgcgccgtccattcattaacgcctgatagcgttgccactcctcgtcggtcagtccccatgtctgagcgcttttacgggtgttcgcctgctcaagctttccggccacagtatctaccgactggctatgcgcccaggcttgagcgtcggtttccgctgcgctggcagggagagaagaggcgattaacagcagagggaaaagtatcgtttcacgatcgctccttaatgaacgctgagcgtcagcgtgcgccccgccgtgcgaaaggtggcctgacgggagtcgatggtcagcaacatccagccgctaaacgactcgccgggggttagtaagcgaacctgttccagactgctggcctgtcggggagtaacggaaacaaagcgcgccccgcctcgatactcaacgccattcaaaacaaacggtgcggatgcggatgaaatcactttggcagccgtcttcttaaccggctttttcaggggatttgctaccgctgacgatgatgatggagcaagcgcactcttacgcccggcgagaagatcggccatctgttgcttcagttccagccactggccggacagcgccccgtcgcgctgctccagcacctcaacgcgctgcgttaccgacgtcatttgctgctgtaattgggcgtgctgctggttcacttcctgccgattttccgcgagcgcttgcgttaactgttcctgagtcaccgcgctaaccaacggcttcggcggttctgtctgctgttgacgcgtttctaccccagcaatgcgttgttcaaactgggcctgttgctgcgctaacgtctgccactgctgctccaacgcagcggaggactgcatcaggcgcagctgctgcgtccacaaaaaggcagacgacgcaccgagtacgatcaccatcgccagacatcccgctttgcgcagaggaaacggcttacccgcccttttgggttctttttcttccattatgatgcgttccctttcaacgttggtttggtgaggaaacgagagggcgatgtttcagcctttggcagctggtacccgtccctcaggctatggcagacaatacgctgtacgtcgtcagcttccagttgccaggcgctacccgccatgacctgtagcgccgtgttcagccgcatagggccgagctggtaatgcaccgccgggagagactggttatacagaacggcattggatgaagtgacggcgcagaggctgtaacccgactgttttaaggcgtagcgcatggcatcagctacggtcggcgtcagcgatgcgggaatgcggatatcaatgatttgttccagcggcgcgcgctgggcggcgctgggatcggtactaaccagcaggtagcgatcgtagcgcaccacctgcggcgcgttttcgcgctggtaaacatcatcagccgcagactgaacgttgctgtttagcgtactggaaagggataacgctggttgttgtaacttttgctttggcgcgcagccgccaatcacaataacccctatcacgcagagcaaataccggtgatatttcataaaagatcctcttatcgacgcggaaaaacgccaatgtgcgaatctttctttacatgttcaattaacaactgttttcccgtgctgaaaaaaagaagcgccgaaaaggcgcttaaaggaggggtattaaaactggttatcaccaaactgtttcggggaaggaacgtccggtgcagagggcacgctcggttccggtttttcttctttataaaccatctcagacccaatcttgatccagttaaccttaattaaccgggctttaagactggggcgaacttcaccggcgtgttcaccttttgtcagcgtgaaaacatcggcagaaagattgctgagccgaaagccaagcaacaccttcttttcctctgcaatagccttctggcagcgcagaatgagttcagaggactccttgccgacgaccataatatcaaaacgggtgtagcccggattatccgttgcgccagttaacgcattaattgagcagcacagcatactgccgttgcgggtttgaacttctctgacgttgttcaaataacccagacccgttacgtgcagattgaagtaattagtttcattagacatcgtgtttctccttgaataaaagcgggacagagggagaaacagcccgaaaagggaagctatttccctcatgggtgaatgggtgtgaatacataccttatcgccgaagcgacgcctgtttaaaaaggttaaacaggcctgggtttgaccgctataccttaaataattcgagttgcaggaaggcagcaagggaggggatccccaggagcttactccagtaagtgactggggtgagcgagcgcagccaacgcacctgaaacttgaagtatgacaggtatttagcgccgccttgcaggtcacggcaacatcgggtgttgtcagagacaacggataggcacgcttattttttcagcaagagggaaaggaattgaaggggaaaatgttttaccgtcaaaaaaattaaacgggtacagaggactctgtacccgccatgatctgcactaaggaccaagggttttaatattcactccggggcgagtagaagaacccggcgcagttttcacggaggttttgcgccttgaaggctatacctgcaacagtacatacgccttcgactataaccgtagagacggagtgctacacagtacccttagaaaataacaaacactgcgggaggacgccagaggaaactatatttcaacggcatgacatttttacccgcagcgcgtccagaattgtgcgttttttgagctttatgcgggccgcataaaggttgttttttaaccatgccttttcccctttttaccgccgatcgcaacagttaaagcgggtgaattcagggccggagaaaagcccgatcgagcctgaccgctgacaacggatgccgacacttcgcctaacgcagcaatggcttgctgcgccgtatcgttattcgccagtacgtcggcgcgcgtgacggcgacggagcgatagcgctgagccgccccgtaaattcgcctgatcgcataaccggcgctggagagatattgttgcttagtctgggtgctgatgagcccaaaaaaatgcgcctgaaacacccgcagggccagctgatcgaatccaaccagcaaatagacgcagcgatagccaatcggcgtgtggctgtgtactgccacgttgagcggcgtttccgcgatacagtccgttagcttgacggagccgggcatgtcagcaaaaagcgcatcgacttcatccagcaatgtctgcatttgctgatgcgatgcgccgatcagcttctccagatgcagcatcgtcgcatccgcccaagggttatccgtcagggagtcctgattgattcggccagcaagctggaagaagcgcggcatccccatgatggccgacttgccctctgaagagcgacggccttgccatagggagatagcgtagcgggtatgaagttctatacgcagttcggagcgcagcgcgcccggcgtggggtgttgaggctttgagttttccgacatcgtgataacccattggttggtttagggtgtcaggatggtcaatgatgggtcgttacgtgaacaatgagaaagtctcatttgatcaaaaaagattgaatgtattggctcagatctgagctgccacttttgtgtcccagagactaaaaaacgcctttgtgcttgtggcatgagcgcatcttcaggtgaggacgttccactattgagccttcagtaatcgcctgttcctccacatttatttgtaaatatgcttgtgacatcattgctgactttcactaaaagtgctagtttcaacatatgatgaaaacatcatttctagtgaaaaaaaccattagatcagcttgatcttagaaatcagcaatgtactgatttcatcaatattgatggtttcaacgaatgctgaaattcgaggttacaatgaaactagctgaagaccccagctatccccttatcttgagattacagtcactgctggaacaaatcccaattattgaaaaggtaaaaataataggagatggtcccagcatggatgagggtgttgactaccttatccaggtccggatagataaaacaacttacgtgcttgcctgcgaaacaaaaaacaatggccagcctagatttgtgcgctcagcgattaaaacccttcggtcttatatgtatggcagagaggagattcttactcctgtcctcctcgctccctatttgtccgccgattcccgacagatttgtcaggaaaataatatcgcatttctggacatggagggtaatgcacaactccagtttggaggagtttatatcgatcatcgtatgcccggtaaacccgtgcctgaaaaacgtgggcttcgtacaatgtttagcccgaagtcagctcaagtgttgcgtatgatgcttaatgaccccctgagaacctggaaagtcaccgaactgtcggaagaaggaaaggtaagtcttggccatgccagtaatgtgcgtaaaaatttgttggaaagggaatgggctgtcattagcagcgaaggacttaccctgaacaagccgggggcacttgtgaatgagtggcgggataactatcgcccaattcaaggaaagaagaaaaatttttatacacctttgcacggcaacgcgctggagtctcaattacgcaacttactgggttgtgatgaagtgcaaggatctgcaattttggcctcattttctgccgcccagtggctgtccccttatggtcgtaccgggatgcattttttctttgccgacgagaaaggaatggagaggctgatatcaggccttaagttaagcacaacatcaaagggcgccaatgtaactataacggtccccaacgatgaaggtatattccttgatgctatcgagccagcaccgggaattgtcactacaggtgttatacagacctaccttgatctcacagttcagggggaacggggacaagaagccgctgaacaccttcgaaatgaatggatggaatggtaattatgacaacaagagaacctcagtcagctgctgactatgaagatcggacaacggctgccgttaaatccgttctgatagagataggacagatcctgggcagttacaaaggaaaattcactgttattggaggagcggtaccttggctgcttcttaacaatgacgatatgccgcatgtcggcacgcttgatattgatttggatctggattcaacagcgctgggcgatggtgaatacgccactttggtggaaagtttgcagggttgcgggtatgaacagcgagagggcgtcaccagagcatttcagctagtgcgtactattcctgcgtctgacgatggccctgccattgatattatcatcgattttctccgccccagagatgctgaactcgttaaaaatgccccacccttaataagtaatttcgccgtgcagcgcgcagacggtgccgatcttgcgctcaaattctatgagatggtggccattagtggtgccatgccagagggtggcaaaaatacagtggaaatagcagtgtgctcaataccggcgctgctggccatgaaaggatatgccctcaatggtcggcataaacaaaaagattcttatgatatttattactgcgttcgtaactatgaggatgggccggaagcgcttgctcaagagtgcctccctatacttgctgaagaaagtggggccatcggatacggatacattgcacaaaaattcgacgaggtggaaggttatggtccaaccagcgtcagaaagtttgttgaagagacgaaactacttggggaaagaactcccgaacagtggcaacaagatgcatttggtcaggtagatctctggttacgtgctcttaacttaagatcttaggtacggtatataaccaccgggcgggcagatatcaaattgctcgcccaggatccctatggcaggccaacaaatacatcaatatcctttgggcacaatgagcgtcactatttcaaaatcatcttcacttttgttaaggtcgttttccaaccctctggggttagctatccaaccatcgggatcgtacacaaaacacagcagctttttacagtcaggatgggaacgataacgctgagaatcaatcaacaactcactcccgatatcttttgcttttaaggttgcgcgcgttttcttgacctcgataatgatcccttcatttttcaataaaaaatcgacgcgcgaactaccgcccgcatagtttggcgtccattcttctggtcgaatatcgtcaaagtaaatatgtaaaagggcatgaagtaaatcttgaacatcatattcgtcgctaataactaaagactctcgattactatgtctagtcttcagttggttagcgaccagatgaaaccgagaacagatctttttaaccagaccaaaatagtcattagagacagaggatgctttcaatgaagatgaaattagttttgacttcttttctgtccaagggaaagcagctccgcaatgctcacaatattccggagtatctgtcgtccctacgtaaaaagcgccactaacctgatactcaccaggaatatggtgattacatgaagggcatcgcgtaatcgttttttccccacaagtagcgcagaaatctctcctgaattcaggtgagctactatagttggcagttacctgatgaccattcaagcatacctgttgtatatcataatgtcccatgagaaccccttacttataaaccagttatccttatgggagtagtatgccaatcaccaaccctatgttacaaattattcctgtataaattatgcgaccgatataaagcctatttttttaaccaattatcgttgagcacacatctcccgcagcctagccatcacgctagcgtcagggctggcccttcccgcttgctcgacggaaaaggatgaagcgggcttggctcctgaggagctcagatactatcagaataccatttccttttagcaagcgattaaactaccctgatactcaggccaattcggaaatctcaaaatgtgtggaaataaaatggatgattaagcatactttattaccacgttgataaaatggattctatttataaatatattttcaatccaacccatttaaacattcaattaaaggatcttttggccaaataactctatttttatcatcatataacacagagatggttttatcacactttctttcctgccaaatatcatacttcctttcaatgtaatcaacatctccagatgaatctaaaatatacatggtccgatcatcatcatctttatatgcataggtgatgatattattaccataagcaatggtttcaatcttcccccaagcttcactaacaacattaccaaaataatcaattaaaacccaattactttcatttggaagtacgacccaagcatggtcaccataaaaaggcttgacatcattataatatccctctaattgcattaagccttgtgaattatataatctataggaataacgtctttttaaccaaaacaggtcaccattgctgatatttgctatatagcttatggtatcattagccttatcaaaatcactagttttaagcttgggaatgactgttcctgaatcagtatttagcaatccataatattcattcttataagcacctgagagataaaaagaatctttggcaacaagtacaggattgacatttttaaccacaacctcatctttattttttataatttcattactaatagatatttgttttcctttactatttttcaaaaatgttttcaaccaatacccattattcaaaggttccatttttattttattgggtacaatagtagttatatcgcctgatgcatttattattatttgtttttcgtctctagatactacagcaaaaccattgttaaaatcactcgcagcagtatatgttgcaggaatcacccattctccatgagtatttatatagccgtaacgataatcaatttttttatgtttatcgtaaacgccaattttagctacagctatatcaggattaaaaggacgaatgtcatcaaacgtattttcagaaagattgacaccgttattgttaatcaatatacgtttacctgtatcgacacggatggatagaagatcacctcctaaatatacgggatcttgaccagtgcgtttaataattagcttgccagattcatcatatatatataaattttccccagaaaaagccagccatcgctccgccatatagtttagcgtatcaaaatgcccctcaggcggaaccactaactttccatgaatgtcaaagaccatatatccatcagcattatgcttataagggaattgcatcgtgttggtatataacaaatttgcttcattacccatgactgaactggaaaaagccaagcacgttgctattgccaatgaatgttttaacatgtcttccccctgtaattaaaaaaattgttggcaaattttagagcccaacaataccgtccgcaacggaatcattcatccctcatatcattgtgagagaacagaattttccctatagttgaacacactataaactatcattcaaaccctccgaaccgatgattatgatgaaaggaagcaatgcatgaacggtacaaaaatcaatgcatcaaaatatacgccgcagctccctcactggagccaagatctcagcaaatggaataacagcgcttccgttatgcaagccctgaatagtgatagcgataagctgaagcacaatgaaacattgctatttgtgaatgatgattattgcgaaatctcgcgccgccgtcccaatgctcgatatcaccacctgttattccaggtattgactggtcttatggctctatccgtgctgtccttcgtgattttttttctgtgtaccatagatatcggagaaattattaagggctacaccgattcagatcgcaaggggagaggtatcttagtattggcactcgttacctttatcgcattactcattattagccttaccgcctttaactacttcctgttcgcccccaaagattatccattacgtttcaaccgtaaaacaggtaaggtttacgtctatgattacgttaacctgcacgtctggcatttggcggaaacgctcaccgcgctatttaaattcccttttttcctccctacgcgcccagtagaaaaagtttttgactggcaagatattcaagctgttgaaacatactatatgaccagtattaaaggcgtgaataagactactcgcagcatttactgcgtagtatgtgcacccggcaccacacagatagtagacaggttcatgctaagcattactggagatggcctcagcgcaacgccttaccgacagtgggtatgggtttgcagttacatgtctttcaacgatacccaactggataatactctggtgaatcgggataatttctggggtagacccgttgtctggtcagataaattcgccaaagagtcagcacgcagtaaatgacatcaaaattgtaacccttatcaaagaagaggttatttttcatactttatgcggcccgcataaagcctattttttaaccaatcatcactgagtatacatctccctcagcttcgccatcacgccagcgacggcgtcagggctggcccttccggctcgctcagcggcgaaggatgaagctgactcggctccagtggactcaggggccatcggagcctcattcccctttagcaggcgattaaactgcccctgcttcgcccgcttcagcgtgccaatcaggtaggccgccgcgttgcgtacttcgccgctttgcaggcgttttcctacatcgctcagcaactcttggcccagttgctcgggtagcgccagaagctgcggctccagagcatcccgctctgcggtagtgatcgtcgccaagagatcggtcggccaacgcagccgctgctccgggtcgtgcgcaggcgcggtatacgtatttttttctacacactgtgtagaagtacgtattacgtaacggttcggtttccgaactgggtcgcaaccccttgtttttcggcttagttcgggatccgaacccggcttattttctcccatttgggtactgagttcggtttccgaaccgggtgattctgactgagttcggttttgtgcatgcgtcagttcatcctgctcacggcgagagtttgccatcgcctgaggtgactggtagcccgaaaggcgcacttcaattatggcgactcgcgaatgacggtgacgcattgcactatcggattttagcgactgaagaaccgctagcgccgtcaggcgaaccgtccgattgccgtgtcggcaggcctcttctacagcatccagccagcccggatcgaaaacctcggcatcatgcgcgctgagcggctcatcgtgctgggcgtagatattgccgcgaatgcgtccggaagcgtcgcgcacgcgtttacacaggcttagccaaccagtaagcctcagcattaataacgcgcggcttaccgtttcccgcgacgccttccccgcatggggagaggcaagctgaagctgtagctcgtcataggtgggaaagacggctccttcgttactttgcgcatataaacggatcatgacccatgccatcttatccaatgcggaaagacggctatccagaaaaagccgccggggaacggcgtcatgcacgttccccataaagattaagccactttgctcgttcaccggcgcaccttccgcatgctgccggatgcgttcattcatcttattcagcgtgaactggataacgccgtctacgggaaacgccactatgccctccccattgacggagagagttccatccagcttttcgccaacgtccagatgaccgtgagggaaatgtcatgttgttctgcaatcaacatcatcacatccagcgcctccagcgaagccagattgctaatctgtgcggctttccactgttcccagacggccagctcttcttcttccgtagggttatggcaacgcccctgccgggtttcgatgccgcttaaacggcgtcgggtgctgacttccgcaggcgttaaaccgaagtagcgctgcatcagttcaatagaaccacccagcgccagcgcacgatcgatccgctgagcgcgctgccgttcccgctgcgcctgttccatcagcattttgagattggcgtggttgatgcacacggtcagaatggataccggcgtgctgatcaggtaatgcaaatcctcgatgctgagccggttcaacgcctgaatctcttccatggtcatacccagcgcctcgcagcggcggatactgccggacttcagttccattatcagttgcgtcaacagggcgttggtcgctatacctgcaatcatggttttcccctcccacgtcattattcacctcccccggtcagccgctgtaactcatgcaggcggcgcaggatccgtatcaggcggaaatatttcactaccgcgatatcgtccagcagaggttcgccccccacttcaggcgctcccacgaccaacatagagaatgcagatgccgccagcgcggtgctgtcggaagaaaagagggaaagaagctgcctgcccgaatgggcgctgtacataggctcgtcgataatgcgaaagccggaactcaggggcgatttatcctcaatcaccagttcgccgatctccagcgcttcggcaagctcgaacgccagccgaaacgccatatcctgtagatgttcaatatcgtcctgcaatgacgggatatgccagatatccgctaccggttccagcccggcagcggcaaaagcaatggagctgacactggtttgaaatgcgcctgacggctcggacacgcccggtgatgcttcggcaaatgcttcaccggacaaaacgggctcaccgccaaacatgtccggctgcaactcgacgccagcagcagggtgaagatcgggaaaacacccttcccctctctcattcagtacctcctgcgttgcgggagccttattttccgccgttgcgggaggtgactgcggcccgcgtgattttgatggtgagggtggcggcgcgtgctctggcggcccctcaggctcaggcacataagtttgttcagggctgccaaaaagctgccgacgctgctgctctgccggatccaactcaatcagccaacggtcccaggtgattgtgggatccggcagcgctttcacgagctcacccattaactcatctttcaggtactccagcgagtaatcggtaagagccgtcagctccagcctgctacaggcactggcaaaaaccacctcaaacgatggggctaacgggagtacagcgctttcctgacacagcaccttccagcccttttccgccgcgctgtagagattgattaacgggagcacttgcgtccgactcaaccccatatagaacagcgaagataagtgagggaaaaggtgcgtgaccgcatattccatacggctgatattagactgcgtaacccggtagccctctccggtcaggagatccgcaagttcttgctgggtgactttacgttcaaattgctcttcataaatggagcgtgctttagcaacgcccagcgccttttcgataaacgagagatcgccgcgcatctcgttttccgccagatggccgataacgcatttcagacgtcccggccatggcttgaatatgcactgaatgcggcgaaaacgttcgtcgccggtttcctgatacagctcggacaaaatagcgtagcgggtattcccgccatcgctgaatatataaacatcttcggcgctgtcagggtttttggtcactttcggaaccgaatccagaccacgggcatggatagatgacttgatctcttcgtatttaggattgcgggttgtgcgtgggttatccgggtttgggcgcagttgctccagcatcagcaccattggcatttcagcaaccggcaatacggctacgttcccaaccgcagccggttccctcccccgtttcagtaacgccgccttcatattgctgcttttcattcagcagtcctcccgtaacccaagctgtaagcaccggaaggaaagtcttcaaaacgggtaatatcggcctgatagcgtacttttaccgtgtctaccggtccattgcgctgcttgccgatgatgatttcagcagtacctttatccatcgtttgcgggtcatacacttcgtcccgataaacaaacataatcaggtcggcatcctgctccagtgcgccagaatcacgcaggtcgccgttattaggccgcttgttggcgcgtttttccaagtcgcgatttaactgcgacagcgccacgaccgggcaacgcatttctttcgccagcgacttcagcgcccgggaaatctcggctatctcaagcgtgcgattttcctgcccgggactacgcataagctgaagataatccaccagaatcagcgcagggtgtccgaactggcgtaccgacttgcgaacccgggagcgcagcatagtcggcgttaaataactactgtcatcaatcagtagtcgatctttccatgacagcaggcagcttgccgcactgcttatacgtccccattcattttcggacagatcgccactgcgaatatgctgaagcggaacacgccccagcattgcggtaaagcgcgccagaagctgatcgaccggcatttccagactgaaaacctgcaccggcccagcgtttacgttaagtgcggcttcgcatagcgctaacccaagcgcggttttccccattgacggacgccctgccagtaaaaccagatccccgggctggagaccgctggttacttcatcaagatcctgaaatccggtaggcgttcccgttactgacgtctggctctgacaacgttgttccagcttatcgagaaactggccgtaagcctccggcagatcggctacgccgccctgttcatgctgctcggctatcgcaaacagacgctgctcgatatcatcaatcagcattgccacgtcggtacgcacatccccggcctgaccaacaatatcgtgccccaacgctaaaagctggcgctgacggccataactggcgacgtactccgcatacgcaacgatattcgctgcggaaggtgtgttcttcgacatttcagccagataagcgaagccgccgacctgttccaaaactccccgctgttcgagatgttcgctaagcgtgatcagatcgacgggcttcccctgcatcagcaggtcatgcatagcgttaaaaatgagttgatgcgggcggacgtaaaaattatcggcggaaacgatcgtcgcgatgtcatcccaacgatcgttatccagcatcaggccgccaagaacggattgttcagactcaatagaatgagggggtaaaaggcgctgggcattattcatggggtacctcccccaacgcctgatacaactgttgtaacttgcggggagataccaacaaaagcggatagccatcgcgcttcacgtcaatatagactggcccggatggcccggaaccaatttcaagcatcatccagtaccttgacacactgacgttaacgctcgacagtaccagctcatgctcgtcttcaagattccagacttcgacgaatgactctctgcatccccatagatccgccaacagacgaactatttttttagatgcccgcacgcgatcttcagcctcaaagaacacgatgatctcgtctgtccttaatgcagggtcgggataggtacactgacaacatgcacgaaaaagagggagataagactggcgcatcatttatccccttttggctgaacctgaagaactgaggcaaaccgttccacccattcagggaaaagctcgcaggctaaatcatgcatcgtgcgtgcggcaggcaggctcttgcgatcggtgtggtattcaaggcgatgagcaggctgccccagactgtgcccggttttgtagacgtccagatcgtaaatatgggtatcgagcaggctaacggaaatatctgcgctgctataagatccttcggcaatgatgttactgagcgcctccagcgcgtcttttgccaaggtggtgtagtccatacagttaaccaacacctttaccggcggcaatacaataccgaatccccgatatggcagtaacccttccagcaacgggatcgtgccgcgcagaaactcccgaacgtccggtaccaccggctttatcatggctaacgccgtatggttggtcgccagtaataccagctccagcataatagagcgcgcgccctgtgaatcgatcaccacgacatcataagcattaaacagcgggtgctggagcaaattacgtaagcggatccgcccatccggcgcgtgcatcattgaggttttaagctgttcgtggggatcgttagagacgatcaagtccagattgctcacgctggtatgggaaataatttgctctggggcgttcagatcgactgtctgcatgagaagttcatacagaccacagggcgcttcatagcgcagagaatagtagcttgatgccgtaggctgcgcgtagtcgccgtctatcagcaaagtctttaggccagcgtcggccaaaaatccagaaaggttagccgcgtgagtagatttaccctcaccgcctttagttgaaatgattgatataacttgcataatgtcacctgttgcagtttcgctttacaaatgacattcataagcttgtcgtcaaaactcagggattgaaaatccccgtgtccttggttcgattccgagtccggcaccactatttaaagaacccgcccaaaaggcgggtttttgcttttctgtagccggactctccatcgaactgcgttcgattattcgccgcacagcggctcaccccttcggggccagcgcggcacgcgcgctgttcaacgcctgcggcgttagtccgagtccgggcaccactatttaaagaacccgcccacaaggcgggtttttgcttttctacgaccggactctccatcgaactgcgttcgattattcgccgcacagcggctcaccccttcggggccagcgcggcacgcgcgctgttcaacgcctgcggcgttagtccgagtccgggcaccaaattcatagcaacggacctccacggaggtccgtttttgcattccaagcccgcagaaatcaacatctcttcaatcccttaactccacccaactcaatcaacttcaacccgcatcatgtccattgcgagggtacaactgagggtgagctgactccgccccggtaggtcttatagccacaagctttttcagccgctgattttcatcctccagttgccgcagacgacgcaattcaagttcagttacgcccagagcagcgaatttctcttctaattataaaaatggcttcagaaatgcccatctttcggcagacttccccgacacagatgccggtttcggcctgcttcagtgcaaatgcaatctgttcttcggtataacgggtctttttcatggcgatatgcctctctgtgagatggaagaaaaaccgtagacttcagtttatcctgtcactcttttctgggaggagatcaacttaagagcctcgtgattaacgtcctggcttcagataaggggtgaacatcccctggaaatcagattttaattctggggtgataagaacatctcctgtaacttttctagattcttctacacctaccatttgggagcaaccgtccattgcattaaatgatcgtaaatttttataagttgtttcactacaccatgcttcatccactgattttacaatgtttatatataaaaattttaactgtggctcattgtcacatttatcacatctaaaaaaaggataccaataacttctccctatacctattaaggtatagcctttcatatatggtatgtatgcctttaatattctattacgaaaatcagcatgctgaatatcaacaaaaaaaatatcacctttatttttataagaaattgtatagtttgtttttcctggaatatagccattgccatacgccatttcatttgccagtctgaaatccatgactatatacccatagccgggcatctgtttagcgtcttgataatcaatagttttatcaaaacttcccgaacaagaaaccataaacaatgacagaataatacaaactgacaaccttgcgagaattgaaggcatctaaatttccctttagtaatattagcttcctgttagcaattatcatccttcgcgttcaacatagcaacaaattattacttagaacatgcaggtttattcatcccctccccgttttgccgtttccggaacacagcgttcatagcggcgataaaatgtgatttgcacggcgtcgtcaattcattttaattttatggcttgtcgtgactaactgggctgttttcacctgtgcggtgaattttgcaggcaaccttatctagttcgccatcggcgacctttaagcttccatatgctaattggtgacctggagcggtaaaggaccgcttgacgacgccgtaacatcggacgatatacaatacatcctgtgagtccatatagaacatcctttgtcggattttcccagctacagcggggagcttattacttagatctgcatccacgtctattcgcgttcaaagagcttgatagccagtcacggtacgacaaatctgcattacttggttcagactgttatgcataaatttgacatacagttggaagccttctgaccgtcagttgggaccatagtcacagactaaatagtactaaaatgagcagatgggaccgtggtcccaggttgataatctgaccgacgatacatgtgggactgaatcgctacgggtttaacaaacacttcagattcccttgtaattataaataatacccatcaggcattaaccaaatccctcaacgtcaccatcaacatcatcggatccatcggcgacggctcaaaccccacccgcaggtaaaaatcccgtgcttcatccgacagggcgtgaaccagcatcccgcgaatgccgatagtctccgccacctgaatcacacgcagcccggcatcacgtaccagggcccgcccgacacctttcccatgtagtgatttatccaccgccagacgacccagtaccacaaccgggatcggggcaggcatattgcggcgaaaacgacccggcgcagtatttgtcgtcacagcgctggaagccagtgagtagtaagccatcaccttcgcgtcgtcgcagcagacaaaggtgcgggatgcgccagtaacctgatttttcatcgcccgctgtttcagccagtgatccatggaatctataccgcagcaaaacggggtaagaatatgcccggcatgaagcggttctggtgccgagatcattcttcctgttcccacggcgcaggggtctgcatagttttacgcagtgcggcattaggtgcaggagcctgatccagacgagcgagaaattcctgataagcctgcggatcggccataatgatgcgttgctcaatcagcgcttcctcagcggcagcgcgggcggcctccagcacaaagtctgtgcggtttttccctctggctttcgccgcccgatcaataagatcgcgttcggcaggtttaatgcgcagatttaacgtttcgcgttttatggacatgctgtttgcggctggcatcgtcttgtcctcttgtgtttctgtggatattaagtatacaacacgcgtaacgcagatgtcattacgataaatttataaggaatcgaatcggagtatcgaaccggacatgcctttaaatattcaaatctagtattttgatttgaaagtaaaattatgggtctaaatctgagttttgataatcaaccaaaaacagatttatgataaatttcaagttaatagagtactgaatgttcccgagtccgggcaccactatttaaagaacccgcccacaaggcgggtttttgcttttctgcatccggactctccatcgaactgcgttaacccgtgatttccctgctgcgtttttctcctggccagcccgctgctagttaacgacaagcgcaggcctattctccatagaatcttttcgcaaacacattttcagatatcagataacacactgattaaaatcgccattttcccgctaaaagcggctaaaaacgcccttttctggaaatcgatccgcccaggtggctgccctgctttccctccagatggccaaatagcatcttatattccattttgcgctaaatgacagagaaatattctttaaataaccgttttcacagttctagtatgcaaaaatatcttaaacgagtgggtaaatggttatgtcactgtttcattccgtgagcgacctgatcggtcatactcccctgctccagttgcacaaactggataccgggccctgcagtctgtttttaaaactggaaaatcagaaccccggcgggtcaattaaagatcgggttgcgctgtcgatgattaatgaagccgagcgccagggaaaactggcgcccgggggaacgattatcgaagccaccgccggcaataccggcctcggtctggcgctgattgcggcgcagaaaaattaccgcctgatcctggtggtgccggacaaaatgagccgcgagaaaatctttcacctgcgggcgctgggcgcgacggtgctgctcacccgctccgacgtcaataaaggccacccggcctactaccaggattatgcccgccgccttgccgatgaaacgccgggcgccttttatatcgaccagtttaataacgacgccaatccgctggcccatgccacctccactgcgccggagctttatcagcagctggagggcgacatcgacgccatcgtcgtcggcgtcggctccggcggcacgctgggtgggcttcaggcctggtttgctgagcactcgccgaaaacggaatttattctcgccgatccggcgggttcgatccttgccgatcaggtcgataccggacgctacggcgaaacgggatcctggctggtcgaagggatcggcgaagattttatcccgccgctggccaggctggagggggtacataccgcgtatcgcgtcagcgaccgcgaagcgttccacaccgcgcgccagctgctgcaggttgagggcgtgctggccggctcttccaccggcaccctgctcagcgccgcgctgcgctactgccgggcacaaagccgtccgaaacgggtagtaaccttcgcctgcgacagcggcaataaatacctgtccaaaatgttcaacgacgactggatgcgccagcaaggactgatcgcccgccccgaacagggcgatctcagtgattttatcgccctgcgccatgacgaaggcgctaccgtcacggccgcgccggacgacaccctggccgcggtctttacccgcatgcggctgtatgacatctcccaactgccggtactggaggatggccgcgtggtcggcatcgtcgatgagtgggatttgatccgccacgtacagggcgatcgccaacgcttctccctgccggtcagcgaagcgatgagccgccatgttgaaactctcgataagcgtgcgccagagagtgaactgcaggccattctcgatcgcggtctggtggcggtgatcgctgacaacacgcgttttcttggcctggtcacccgcagcgatgtattgaccgcctggcgtaaccgagtcgcacaataaggaattttttatgtcatctatccacaccctgagtgtacatagcggaaccttcaccgacagccatggcgcagtgatgccgccgatttatgccacctccacttttgctcagccagcgccggggcagcataccggttatgaatattcccgcagcgggaatcccacccgtcacgcgctggagacggcgatcgccgacctggaaaacggcacgcgcggctacgcgttcgcctccgggctggccgccatctccaccgtgctggagctgctggataaggacagtcatctggtggcggtcgatgatgtgtatggcggcacttaccgcctgctggaaaacgttcgccgccgtagcgctggtctgcaggtgagctgggtgaaacccgacgacctggcgggaattgaagcggcgatccgccccgatacgcgcatgatctgggtggaaacgcccaccaacccgctgctgaagctcgcggatctcagcgccatcgccgccatcgcgcgccgccataacctgatcagcgtcgccgataacacctttgcttcgccggcgatccatcgcccgctggagcatgggtttgatattgtggtgcactccgcgaccaagtacctcaacggccattccgatgtcgtcgccggcctggcggtggttggcgataactccgggctcgcggaaaagcttggctatctgcagaatgcggtaggcggcgtgcttgacccgttcagcagcttcctgacgctgcgcggcatccgtaccctggcgctgcggatggagcgccacagcgcgaacgcgctgcagctcgccgaatggctggaacagcagccggaagtggagcgagtctggtttccctggctggcctcgcacccgcatcatcagctggcgcgccagcaaatggccctgcccggcggcatgatttcggtggtggtgaagggcgatgaaggttacgccgagcgcatcatcagcaagctgcgctggtttacgcttgcggagagcctgggcggcgtggagagtctggtgagccagcccttcagcatgacccatgcctcgatcccgctggagaaacgcctggcgaacggtatcacaccgcagctgatccgcctgtcggtggggatcgaagatcctcacgatctgattgccgactggcagcaggcgctgcgggcggagtgattattccgacgcgcgggtcgttgtcagcgcgtcggccattccctgctgaaggtgggcgataaactgcgtcagcttcggcaggggccgacgatcctggcgccagagcagatgcacaggccgcggctgcggagtccacgcctccagcacgcgcaccaggctgccgctggccagcgcatcggccagcagtacctccggctgcatcagcagcccggccccggcgatcgccgcctggcgcagcgcgtagccatcgttgcagcgcaaaaccgcatcgcgtttccagcgcacttctccctctacgcccggcagccgccactcgttgcgggcggtccagaccgtatgggacaggcagagatgatcggcgagatcctctggcgtcccgggggtcccgtaacgcgccagataagccggcgcggcgcagatcaccatccgatacggcgccaggtagcgagccaccagatcctcctgatggatctcgccgatacggatcgccagatcgaacccctcatccaccagatcgaccatccggttagtcagatccagttccacccggaccgcaggccagacctgcaggaaggtggcggtcaggggcgcgatcacgctggcgccgaacgaggtgggagcgctcacccgcagggtgccggccggcgccagccgcagccgctcgaccgcgctttcggcgatggagacctgctccatcacccgtttcgcttcgtcaaaatagactcgcccggcgtcggtgaggctctggcgtcgggtgttacgctccagcagacgcgtcgccagctggctttccaactgggcgatatatttcccaaccatcaccgccgacagccccaggcgcgacgccgccccggtaaagctgccgcactccaccacggcaataaacgtctccatccctcgtaatttgtccatattgctaacctctggttagtaatgttctaacttttagccagtttatccgagattacttttattaaaaaatagcctctcacctcatcaggagtctgccatgaaaattatcgttatcggtgccagcggcaccatcggtcgcgcggtcagcgaagaactgagtcagagacatgacgttatccgcgtcggccgcacccggggagattatcaggtggatatcacctcgcaggagagcgtcgaggcgctatttgcccaaacgggtgaagtagatgccatcgtctccaccaccggcaatctgcactttgggccgttaagcaccatgaccgacagccagttcaacctcggtctgcaggacaagctgctggggcaaattcgcctggcgctggtcggccagcattttctgcgcgacggggggtcgattaccctggtcagcggtattgtcgcgcaggaacccattgctcagggggtcaatgccacgacggtcaacgccggtctggaaggctttgttcgcgccgccgcctgcgagctgccgcgcgggatccgcatcaatctcatcagccccaccgtgctcagcgagtcgctggcggcctacggcgactttttcccaggcttccccagcgttcccgccgccgccgcggcgcaggcctatcgccgcagcattgaaggcgttcagaccggccgcatctacccggtcggctactagcctgtgccggcccgccggggccggcgcttacatcaggccgtcgttgcaggtacactgacggctgattgtctccggccgaaaaactgatgttgaaaaaattatccttaattatcccgctactggcgcttatcgcgctgctggtctggtggttcaccccgcattacaccgaggaagatgaagcttactaccgggcggtattttgcataatcgatcatgacgacagccgccagttcctccacgatatgcagaatatcgtcgaggggggaaattctgactacgcgctgcataaaacccattaccttccggcgctggggcagcggatgctggatacctggcgccagctcagcccgcaggaacagcaggtgctgcgtcaggacaagcagcgctgcggcgagatattgcgcgaaaaacaacaggggaaatcatcctgacgagttggcaaaattgcagcatatcgccagcgtcgaataagattgtgctgttgatgaccggatcgctgtcacaaaatatccggtcgtcgtcgcgtcacagtacgacgttttttctgcggcggaatacgataaaaagtagttgatctggtacgaactaactcttattttgcttcacagttttcaaaatgagataaaactgatgcctgtcattattgccagtagtgttaaagaagccaaagcgttaattaacggtggaaaatacagggaaattattcttaacttcgatattgatgccgatgactttttctctctcgccagccattccgccggaactaaaatctccatcgccgaccgcaacgatcgctctccggtagaatcagcaaaataattaacccgcgagggacgtctatgtggttgtttattggaacctttgcgctggcttttctcgcagcgctgatgctggtctggctcgatgaccggatcgccgaaacggattgaccctgcgctggacgttaacgtcacgcagggctgcgcgccgccgaaaagcggcgcacagcagagacgttacagggaggccgccagccgctcaacggccgtcagcaatccggcttctgacaccgtggagtaagaaagacgcagggtacgggtatccggcttatcgtgatagaacgcttcacccgggacgtacaccacgccgttttccagcgttttcttcatccattccatggtatcgaacggatagcggaaacgcgcccacaggaacatccccccctgcgggcggctgaattccaggtgctcgccaaggcggctttccagcgcatcggccagcgccacgcacttcttgcggtagtcttcgcgaatcaacgcaatctggttatccagccggttcagactgaggtattccgcagtgatcacctgcgacagcatattggtatgcagatccgccgcctgcttcacaatcaccgtctgctgcgccagccagtccggcatgacgatccagccgatgcgcatccctggcgcgaggattttcgaaaaagtcgaggtgtaaaccacctgatcttcacagctcagctcgacagcatgctgatagagcgggcgccgaacggcgtctgtaaagctaatttcgccgtagggatcgtcttccagaatgacgaaatcatattttttcgccagctcaaccaaccggcgacgacgcgcctcgctcagcgttttgccgccgggattgccgaacgtcggcaccaggtaaacagctttgacgcgggtggtctccagcaggtcggccagctgctccaccagcatcccgtcatcgtcggtgtcaacgctgagaatattggcctgcgccagctgaaatacctgcagcgccgccagataagtgggacgctcaacgacgatagtatcgcccggatcgagcagcgtacgggcaacgatatccagcgattgctgggagccggaggtgatatagacctgggcggctgaacaggcgacgccacgggagtggcaaatttcactcaccgcctggcgcagcggcgggtagccttccgtcagaccgtactggaatgcgtcattaaaacgctcgctcatcaccttctgcaccgccagctccaggccttcggtatcaaacagttccggggccggaatgccgccgccaagcgaaatcacgccgggcagtttactgtgcttgagaagttcgcggacggcggagggcttgagttcacccgcgcgggcggcgagacgccgatcgtgcatactattttccttttctgtcttgttgttgtgttaattatcttggctttgttgcaggtgctccccggcggcgcttaccatgccggggctatccttttcagtacgttgtcacccggacaggggtatgccgctacccgggtttcgtacgtcatgctttgtctttcaaaacgattaacggctcgatatcgctctcttttttcaccaccagcgacgaatcgccgcgcaggcaggtaccgccgtagttaccgccgacggtaaatgtgcacacctgaatgtacttaccgtccactttcggcaggcaccacagttgctggtagatattcttgcgatcgacaaactggccgctggtcttatccagaagttcatcctgagggccgatcaggtcgatattgttcccgcagcgcccggaaataggcttcaccgcatagccggttttcgccagctcgtcgttaacctcaaaatcggtatccagcagatagcgatgatgcgggaacagcgaccacagcaccggcagaatggctttgttgccggggatcaccgtccacaggggttcgaataccaatacttcaggacgcagcaggacgtcaatcagccgcacctcattctgcggatgtccggttcgaatcggtaccgccgcgtactcctcggcgctgacttcgcgcacctgctcaatggcggtttcccatgcccaggttttccagacgcagttgaccagccgcccgtcggcgtcgatcagctgaccggcagcgtcccagcgcagctcatcaagaccaaagagaattttgctctcaaaaccggcctgggtcagcgaacgctgaataaactgcgcgtggtagttctcttccagatccttgtcctgcatgatgtggacgaagggccgcgcccggctgtgtttccacgcccccgccagctcatcgagcagaccttccgccggattgtggccggtgccgtagtagccctgcttcagccactgttcgaggatcagcccgccttcggtatggcaggaagcggaatcggcattgtactcgtacaccttcagcccgcgctcgtccatgcaaaaatccatgcgcccggtgatcatatgatgacggcggcgctgccacgagaggcgcagacgaggccagagaattttcggaatatcgaacagcgccagcaggttgtcatccttcatcaccttatcggtggcgtgcagatacatcaggtgcagctcgttggtggctttgatcagctcctgttcggcactttcgctgatggtgaaatactgatagggatcctggttgatgaaatgaccgttggctgccacgtaggctttctgcaacgggtctttctcgttcagccatttaccgcgaaactggccgttgtttggcagccgcgcgcctttgatggccatcgcctcgcccggcagcaccggctgcggcaggctgtgttcggtatcagcggtctggatcatccagcctaaaatttcggtatcggcaaaggtatctttgatggtgtaccggccgtcgttgacctcgagggtcagctcgcgggtccactgctggccctgcggcagcggcgagtgaatcacgttctgctcggcgatacgcaccttattgccgacaagctgggtgatcaccgccacatggccggtgtgcttaaactcgccccccttctgccagatcagcagcgaaccagcgataggcggacggcgggagccgttggcgaaggcctgcagcggcaaaatattgtcattgaccacttcgcgcaggaaacgcagggagaagatttcataagccatccccacatcggtgaagacaaagccataggtcaggaacagaaagcggcgcgcaaactccacgcactgccatttatgccccatatactcattgccgatgtagctgcgaaacgtcgcgtcatccgggtagtcctgcggatttaagctactgtaattcgatgaataaatcgctacgccaccgggtgcatagcctaacaatgtcccaaacggggcgtcactgcttgtcgatcctttgctcatttagcctgacctcaaattaatgcagcccgggcagttggcgaaacaaaactccctcttcttatcctgccgcaggcacttaccagacagaggtgtaacgatgataccactcattcgtttcgctaatcgtgccgttaaggaaaataaccctgcagccggaaacaaaagtgatatcgttatcggtgatataacaaaaaaacaacgcaacatcaggagtcgacaatgagcacaccctcgcatctgaatgcccaaccgctggtctggggacacggcccgcggacgtttgaggtgttccttgagcccacctgcccctactctgtccgcgcgtttaataaactcgacgatctgctcgatgaggtcggcgccgataacgtgaccatcaagatacgcctgcagtcgcagccgtggcatctgttctccggggttatcgtccgctgcatcctcgccgcgtccaccctgccgcacggcagagagcaggcgcataaggtgatgcaggccgtggccgaccatcgggaagagtttgagtttaccgatcactgcagcgggccgaacatgaacgccacgccgcagcaaatcattgagcgcattgaacgctacagtcacgtgctgctgggggccgcctttgcccgcccggagctgcaggacgtgatcaagtggcacagtaaatacgcccgtcagaacggcatccatgtctcgccgacctttatggtcaacggcctggtgcagccggatctgggcagcggcgatgatgtcagcgtgtgggccgcgcggattatggcctgaggtcacctgctacactttttgtacatccacgaaaaaggcaaaccagcatgtcagagcaaaactaccagccaccaaaagtgtgggaatggaagcaaaacagcggcggcgcgttcgccaacatcaaccgtcccgtttccggcgcgactcatgaacgcgtcctgccggtaggaacccatccgctccagctatactcactcggtacacccaacggccagaaggtgacgatcatgcttgaagagctgctggcgctgggcgtcagcggcgcggagtacgacgcctggctgatacgcattggcgaaggggatcagttttccagcggctttgtcgagatcaacccgaactcgaagatcccggccctcagcgaccattccaccacgccgccgacccgggtatttgagtccggcaacattcttctctatctggcggaaaaatttggtttcttcctgccgaaagatcctgccggtcgcaccgaaaccctcaactggctgttctggctgcagggcgcggcgccgttcctcggcggcggcttcggccacttctataactatgcgccagtgaagatcgagtacgcgatcgaccgctttacgatggaagccaaacgccagctcgacgtgctggacaaacagctcgcccgcggtcgctatgtggccggcgaggagtacaccatcgccgatatggctgtctggccgtggtatggcaacgtagtgctgggcaatgtctataacgcggcggagttcctcgacgccgggagctataaaaacgtgctgcgctgggcgcaggatgtcggcaaccgcccggccgtcaagcgcggacgcatcgtcaaccgcaccaacggcccgctcaatgagcagctgcatgagcgccatgatgcccgagactttgacacccaaacggaagataagcgccaggcgtaaggtcttcaccctttcccgttgacgggaaagggttcccaccacaggacggttccgcctgcgaagccgtcctgtttagctttccagccgatagcccgccagaaaatagcgcatcgccatacccgacccaccttctttgaagaaatccatcaccatatctctgtcaaggccatagcgacgggtgaggatccccgcttcccaggcgctgagctggcggtcgccggttttttcaaacatgcggtgcgagtagccgagcacaaacccgcgtttatagtcggcgcaaaaattcgccgcatgcgcggcggtgtcagcataggatgcctgtagccccgccattaagcctttgccaaaatgattttccatcgcgccctcccaatcgttatataataaattatatagcgtttttttgagcgagcggtagcgctatttatgacggttgcgctagcgtaaatacttctcaaaccatgccagcgtgcgttgccaggccagatcagccgcagcccgatcgtagcgcggcgtggaatcattatgaaagccgtgattcacgccctgatagaaataggcctcgtagactttatggtgttccttcaacgcctgttcataggcaggccagccttcattaatgccgctatcgaggccggcatagtgcagcagcagcggtgctttaattttatcgacctccttcagcggcggctggcgaccgtaaaacggcaccgcacaggccagctcggggatcgccaccgctgccgcgttgctgacgccgccgccgtagcaaaaaccggtgataccgaccttccccgtcgcctgtggatagttcgccataaacgcgaccgccgcaaaaaaatcattcatcagcttcacgggatcgactttctgctgtagggcgcggccttcatcatcattccccggatagccgccgacggcgctcaggccatccggcgccagcgcgatataccccgctttcgctacccgccgggctacatcttcaatataggggttcaggccgcggttctcatgcaccaccaccacagcgggcgctttgtcggctatttttgtcggcgtcaccaggtaagcccgcacttcgccgtgaccgtcaggagagggataatgaatatactccgggcggatatccgggtcggtgaacggtacctgctctgccagggcatagtcgggcttcagcagattaaacagcgccagcgcggtcatcccgccgacagtatatttccccgccagctggagaaactcgcgtttactgattttgccgtgggcatagtagtcataatattcgagcaactgctgcgggaaatctttggccgttaatcgcgtcattaccctgcctccgttgttaagcgctctttaagcaaagcagaagcccggacatacgccagcccagaaaagcatgaaacggggagaaacagcccagcggctaacaccgccgggagagaagggatcagtgtttcactttggtcagacgatcaaggtagcccatcacaaaggccgaaagcacgaaggtcaggtggataatcacgtaccacatcagcttattgtccgggacgtttttcgcatccataaacacccgcagcaggtgaatagaggagatcgccacgatggaggcggcaaccttatttttcagcgaagtcgcgtccattttgcccagccagctgagtttttctttaccctcgttaatatccagctgcgagacaaaattttcatacccggagaacatcaccatcaccagcaaaccgcccaccagggtcatatccaccagcgacagcagggtcagaatcatatccgactcactgacgctaaaaatatgcggcagtatgtggaagatctcctgaaaaaatttgatggtcagcgcaatcagaccgagcgagaggccaaaataaaccggcgccagcagccagcgcgaggcgtacatagcattttccagaaagcgttccataagatcctgtcagttaacataaacggccgccattatatcgcaacagggttacgcttatgcaacatcagccgccagcgtcatctacaggcggccagaaacggtttctttaaagtatgacctcaaagtcctgcaaagcggagtagccctcgctttgtaggccaaccattgaagcagccagcaggccaaatttcgcgccgacccattttcccttcccggcagcaaaacaaagaggaaccttccgccactcctcctcggctcgccaggaaaattgacacaggccgccttcgcctacggccacctgcagctgacacttgccgcacttaagctcagcaagaacctgacgagtttcgcgcaccacgcccgcatcgctcatccaaccgtgtcgccacacgagccggtaacccccttgcccaaactccaccagcaaagcggcgtagcgttcgccgtatacgatcaggcctccggcatcaccgtcctgagcggcatataacgttacgcttgttttcgcgctaaaagttagcgccgggaatttctgcagcaacagctgcggcgcccagtataacgctctctgtccatcgacttcggataatgggacgcagcgtaatcgaagttcgcctttcgctggcagcagccactcagggctggggttagcctgccactgccactgtattcccggttggccttgcgcaaaatagtcgctggtttgcggcgccaatgccggtgaaggcgttaaccctttaggacgcggccaacgtaaaaccggctgtccgacgccgcagttgccaatctgctcaccgatacgcggccagccatcgttaccccaggacatcggctggaggtgaaccacgcggccatagaggtgtaagtcctggaaatgaacaaaccagcattcgccctcctcaccctccacccagccgccctgatgtggtccatttatcgaggtgtttccctggaaaagcacgtttttggcttcccagggccccgtcatctggcgcgcgcgcagtaccgtctgccagccattttcaaccccgcccgcaggagcaaagatgtagtaccaaccggcgcgttgataaacctttggcccctcaagggtaggtaaatcgcagcagccgtcatagataatctgcccttcgcccagcaattcgctggcgtccggcgccatcgcaaacaactgcagtttatgcttgatgccgctgcggctatgggcgaaggcatgtaccaaccaggcctgaccattgtcgtcccagaacgggcagggatctatccaacctctggcctcgcgcaggcagtgcggagcgctccattccccccacggatcctcggtatggcagataaaaataccttcatctggcgtgctgaagcagacccacagcttgccatcgtgccagcgaatcgacggcgcccatacgcccttacccggctgataccggtcataaccaggtagcggcagttcatccataacgtggttgatgatagtccaattaaccaggtccgttgaatgcaggatcggtaaagcgggcacatggttaaaactggaagagaccataaagaaatcatcgcctacgcgcacgatatccgggtcggaataatcggcgcataagataggattctggtattcagaaggggtcatatttcgcatctcctcaagccttttccggaacggcgtttagcggcaaatgcgtctctgaatgcccctgctgctgacgcatggacagctcgcgctgaattgtctgcatcattttgtcatccagcttatagaaacgcgccagccaccacaggagcaggtaagatagtgatggaccgagggttaacagccccacaattcccattgtcgccagcggagtctgcgccgttacgcccgcctgatagccaaatagcccaagcgaaaaacctacggcggcgccagcaaccgccatgcccattttcaaagcaaacagattaccggaataggataatcccgtgatgcgacggccaaacttccattcgccataatcggcagcgttggccatcatgttccatttaaacggctggtacatctgatggaagaagccgaccaggaagtataaagggaacaccaccggcagccaggtcggcggcacaaagaacattacgacgccaaccaggaccagcaggaggttgatatttttaaacagcgataccgcgcgatagcgcttggccagccatccggcggcgatgctgccgataatcgtgccaacgacactggtggaaacaaatgctgatttcatggccgttcccgccgctgactccacaccgcctaacatcaggtaggttgcataatagagcgtggcggcgctgcgcataaccccggccatactggagaaaaaagtaattatcgccacaatacgccactggtcattcgccagcagctgacggaggtcttcgcgtatgctcccctgctgttcaacagctggagccacgcgttctttggtagagaagaagcaaaaagccagcattacaatagcgatcgcgcccatgattcccattgtcgcctgaaaaccaaactgcttattttctttaccgaaaaaatccaccaggaacagggttgcgacagaaaccatcagaccggccagagatgagatcgtaaaacgatatgactgggctgaaaggcgatccttctcatcacgcgtaatgactccgcccaatgcgcagtagggaatattgataaaggtgtaacacagcatgagtaaggtgtaggtcaggtaggcataaaccagtttacccgatgcgccaaattccggagtcgtgaaggtcattaccgccagcacggcataaggtacggcaaaccagataagccacgggcgaaaatggccccagcgggtctttacacggtctgcaacaatgccggttagcggatcggtaatcgcatccagaacccgcgtcaccaggaacatcactccgactgcggcagcagaaagcccgtaaatatccgtataaaaccatgtcagaaacatggttaccgaagagtaaacgataccgcaggctgcatcccccatgccatatcccagcttctccgcaaatgacagtttattatcgtgattcacaatataatccctctcagatgaagtggtattcactgtagaggcaggataaaaactatcctattgtcatttttcgcatcgggtttatgttttctgttaactgagaaagttgtcacacatctataagattggtcttacaagttattgcgtcacctattaaaaagctggcgcaaggccagcctgagaagaaaagtggaaagggggaggttacttcgctttgacggtctcttcgcccaccagcccgatcttgagatagcccgcctgatgcagggtatccatcactttcatcatcgtctcgtaatcgacggttttatccgcgcggaagaagacggtggtatcttttttgccggcggtcaggctatccagggcgttaatcatattcgcttcggtaaccgggtcgttgccgaggaacatgctcttatccgccttcaccgacaggtagatgggtttttccggtcgcggttgcggctggctggaggaggcaggcagattgaccttcacgtcgaccgtcgccagcggcgcggccaccataaagataatcagcagaaccagcatgacgtcgataaacggcgtcacgttgatctcatgcatttcgccgttatcgtccaggttttcattaagacgcatcgccatagccgatcaacctacccgtaatttctgcgcgctgcgcaccggcttcacgccgctggcgctgaggtccagatcgcggctttgcagcaggagtacctgagcggcgacgtcgccgagcgaggccttgtagctgccgatcatgcgggcgaagatgttatagatgaccaccgccgggatggcggcgaacaggccgatggccgtcgccagcagcgcttctgcgatgcccggcgctaccaccgcaagattggtggtctgggtctgggcgatgccgataaagctgttcatgatgccccagacggtaccaaacaggcccacaaacggggaaatggcgccgatggtcgccagatagccgttaccgcgccccatatggcgaccaaccgccgcaacgcggcgctcaaggcgaaaaccggttcgttccttgatgccttcattgtcttcggcaccggcagagagttcgagttcgttctgcgcttcattgataagctgggtggtgaggcttttcgcctcaaaggcgctggcgatatcgctggcctgatcgagagagcgggcttccgccagctgctgctgttcacgtttgaggcgacgcttgctggcgaggatttccgcccctttacggaagaagatggcccatgtgacgaccgacgccagaatcaggccaatcatcaccaccttaacgacaatatcggcatgatgatacataccccaaacggagagatccgcctgcatcaaattattacccacgctctatctccacgacgataatcacaaaatctgcccacaataatatcaaaacgacatcgaattgatagtggttctcattagtatttacactgtgcagcaaatcacgtttattttccttgcgcttacgcagtaaaaaagcggctaaccgcgggcctggtaaaattttcgcctgtatcggcggtgcgctggtacagaaaagcagattcatgttagtttagacgtccagacgtataaaaacaggttcgtcaacatggctgataaacatcttgataccgcgctggtcaacgccgggcggagcaaaaagtacacccagggctcagtgaacagcgttatccagcgcgcgtcatcgctggttttcgacaccgtcgaggccaaaaagcacgccacccgcaatcgggccaacggcgagctgttctacggtcgtcgcggcaccctgacccatttctcgctgcaggaagcgatgtgcgagctggaaggcggcgccggctgcgccctcttcccctgcggcgccgcggcggtggctaacactatcctggcgtttgtcgagcaaggcgaccatgtgctgatgaccaataccgcctatgagccaagccaggacttttgtaccaaaattctcgccaaactcggcgtcaccaccagctggttcgatcccttaatcggcgccgatatcgcccgtctggttcgccctgagacccgcgtggtgttcctcgaatcgcccggctcgatcaccatggaagtgcacgatgtgccggcgatagtcgccgccgtgcgtcaggtcgccccggaagcgattatcatgatcgataacacctgggcggcggggatcctgtttaaagccctggattttggcattgatatttccattcaggcaggcaccaaatacctgatcggccattccgacgccatggtgggcaccgcggtggcgaacgcgcgctgctggccgcagctgcgtgaaaatgcctacctgatggggcaaatgctggacgccgatactgcctatatgaccagccgcggcctgcgcaccctgggcgtgcgcctgcgtcagcatcatgaaagcagcctgcgcatcgccgagtggctggcgcagcacccgcaggtggcgcgggtaaaccaccccgccctgcccggcagtaaaggtcatgagttctggaaacgtgatttcaccggcagcagcgggctattctcgtttgtgctcagcaagcgcctcaatgatgccgaactggcggagtacctcgacaatttcagcctgttcagtatggcctattcgtggggcggctttgagtcgctgattctcgccaaccagccggagcaaatcgcccacattcgaccggatgctgaagtcgacttcagcggcacgctgatccgcctgcacattggtctcgaaaatgttgacgatctgcaggcggatttagcagcgggcttcgcgcgtatcgtgtaaagtgacagtcagtggcaacaatagcggacgctttttagcaaagcggccgcttttgttgcgcccgggatcaaggtgctcgggcctcttcaggagtacactagtcaacaatacggtaccacttaggaaagtccatggttgtcattcaagagattgtcgccgcgctgtggcaacatgattttgccgcattggcgaaccctcacgttgtgggcgttgtatatctggttatgttcgcgaccctgtttctggaaaacgggctgctgcccgcctcctttttaccgggagacagcctgctgctgctcgccggcgcgctgattgctaaaggcgtcatggactttgtgcccactatcgccattctgaccgccgccgccagcctcggctgctggctgagctatgtgcaagggcgctggctgggcaatacgcaaacggtgaaaggctggctggcgcatctgccgcataagtaccatcagcgcgccacctgcatgtttgaccgccacggcctgctggcgctgctcgcgggccgttttctggcgtttgtccgcaccctgctgccaaccatggccgggatttctggcctgccgaaccgccgcttccagttcttcaactggctgagcgccctgctgtgggtctgtgtggtgacgggtcttggctatgcgctgagcatgatcccgtttgtgaagcgccatgaagatcaggtgatgacctgtctgatgatcctgccgattgccctgctgctggctggcctgctcggcacgctgttcgtggtcattaaaaagaaatattgcagcgcctgacgcttacctgccgggggggcctgcgcccgcccggccgccctttcccggtattacatcccctgcatcgtgcgaatacgcgcggcgtcttctcccggcgtcaaaccgaagtagcgcttaaactcgcggctgaactgcgaagggctttcatatcccacgcgcatcgccgccgcgctggccttcatgccgtcatggatcatcagcattcgtgctttatgcaaacggtagtttttcagatactgcaaaggagaagtgctggtcaccgctttaaaattatggtgaaacgctgacacactcatattcgcttccgccgccagccgatcgacgctgaggttttcggtgtactggctttcgatatgcttgagcacgcgacttatcaggctgaagtgggtctgccggctgaccagcgccaacagcgcgccgccgcagggccccgtcagcacataatacagaatttcgcggacgatttgcttgccaaggatccgtgcgtccagcggccgctccatcacgtcaagcagccgttcggcagcgcacagaatatcctccgagagtaccgcggagtttatcccgctggaggcgaccgcgggctgaaacagcggatcttcgccaatatccatcagcagctcttgcagttgcaggatatcgacgttcaggcgcatcccggcgaggggcacctccggggtggcaaaggtttcgcactcgaaaggtagcggcacggtcagcagtaaatattcgtttgtatcgtagcgaaaagtccgctcattgatataaccaattttatggcccgaaaagagaaaaacgatccccggctgatacatcaccggcgtccggggccccggttgcgttccgtacagcaaacggacgtcaggcagcaacgaacttaacatttcgtgcttatctttcagcaggttaatcttctccgttaatgtccgacatatctctgcgtgttgcattgccaccgtctctcccgatgtttcttcacctgtacattgtgcgcaggccgctacaaattctccagccatatggagaaataggcaagacatcggcaggaatgtgcattgagggtcaacggcgccaggaccacaataaccttcatcgggcagcggtatcgtccctgtcgacggttttactctttggaggacttaagcaatgaataatttcgacctgcataccccaacccgcattctgtttggcaaaggcgcgattgaaaagctgcgtgaacagatcccggcggaagcccgcgtactgatcacctacggcggcggcagcgtcaaaaaaacaggcgtcctggatcaggtcctcaccgctctgaatggcctggatgtccttgaatttggcggcatcgagccgaacccgtcttacgaaaccctgatgaatgcggtgaaactcgcccgggaagagaaagtgaccttcctgctggcggtcggcggcggttcggtgctggatggcaccaagtttatcgctgcagcagcccactacgacgcggatatcgatccgtgggaaattctggaaacctatggcagcaaaattgccagcgccattccaatgggctcggtactgactctgccggcgaccggttctgaatccaacaaaggcgcggtcatatcgcggaaaaccaccggcgacaaacgcgcgtttatgtcttcgcacgtccagccgcagttcgcgatcctcgatccggtttatacctataccctgccgccgcgccaggtcgcgaacggcgtggttgacgccttcgtccataccctcgagcagtacgtgacctacccggttgacggcaaaatccaggaccgcttcgccgaaggcattctcctgaccctgatcgaggatggcccgaaagccctgcaggaaccggagaactataacgtgcgcgccaatattatgtgggcggcgacgcaggcgctgaacggcctgatcggcgcaggcgtgccacaggactgggcgacgcatatgctcggccacgagctgacggcgatgcacggcctggatcacgcccagacgctggctatcgtgctgccggcgctgtggaatgagaaacgcgatgccaagcgcgagaagctgctgcagtatgccgagcgcgtgtggaatattaccgaaggctctgacgaccaacgtatcgatgccgccatcgccgcaacgcgtcagttcttcgagcagatgggcgtgccgacccgcctttccgattacggtctcgacggtagctccatcccggcgctgctggcgaaactggaagagcacggcatgactaaactgggcgaacatcaggatatcaccctggacgtcagccgccgtatctacgaggctgcacgctaagcgctccccgcctgattcacctctccttacgttaaacaaacgccggggagaggtgtttttactaccgtttttagctatttcgtccagacttaatgctacccctcggcggatcctgcttcgccgagttcattaacaggaggaaggcatgacacatccaaccgttataaaactgcacgacggcaacctgatgccgcagctgggtctcggcgtgtggaaagctggcaacgaggaagtcgtctccgccattcataaggcgctggaagtcggttatcgctcttttgacaccgccgccgcgtaccaaaatgagaccggcgtcggcaatgcgctgcacagcgctggcgtcaaccgcgatgagctcttcatcaccactaagctgtggaacgacgatcaaaaacggccgcacgaggcgctgaaagagagcctcagcaaactgaagctggactatgtggatctctatttaatccactggccggtaccggctatcggccattacgtcgaggcctggcaggcgttgatcgagctgcagcagcaggggctgaccaaaagcattggcgtgtgtaatttccaggtaccgcatctgcagaagctgattgatgaaaccggcgtcgccccggtgatcaatcagatagaactccatccacttatgcagcagcgtcagctgcacgcgtggaacgccacccacaagatccagaccgaatcctggagcccgctggcccagggcggcgaaggcgtcttcgatcaaaaagtcatccaccagctcgccgataagtacggcaaaacgccggcgcaaatcgtcatccgctggcatctcgacagcggtctggtggtgatcccgaaatccgtcacgccgtcgcgtattgcggaaaactttgacgtctgggacttccgtctcgacaaagatgagctgggagcgatcgcgaagctggaccagggtaaacgtctcggtcctgacccggatcagtttggcgggtaatgctctctcttgccatcgcctttagcgcctcagcgttaaaggcgatggcagaccagatgaatatcctctggctccagcgcaaacagcgccgggtcgggcttatccgctaagcgacatccctgagccagataaaaatcgacggtgtttttgttggggatcgacgagatatagaggccggacgcccccatttctggcagctggtgcagggcatactgaaacagtcgccgcccccagccctggccgcgctttcccgccccgacataaaagaataatagctggcgcagctcgccattcatgccgcgaggcagcgtatccagcgccgctgcggcaatcatctgctcatcgtcaaaaaaggcgaaaaaaataccgccgcgatcgtaacaggcctcgtgaatcggagtataaacctgacgatcgtgagggtcccagccacgcacgtcataatattcccgataagcccgcagctgaccgttatcgagacggtagagcgtatcgataatttcgctgcggtctatctcccagagctggtccagttgttgtcgcgacaggatgaccggcgtcatcacctctctccttttttcacagatgttcccggcgagcgatcccgccgggccagccgcttagcgtgatacggccttcggcttaacgcgttttttcgcgcccgcagcggcaggcgtctggcgctgatgggcgatcggcgtgtgcttggtcagcgccggacgagtatggcggttctggcgacgcgcttcacgcatttcgtccagggttggcgctggcaccaggcagtcgcgacgggagccaatcaggtgcttcttgcccatcgcctccagcgcctgacggatcagcggccagtttgccggatcgtggtagcggagcagcgctttgtgcagacggcgctgtttatcgcccttcggcaccaccacctcttcgctcttataaccaattttacccagcgggttcttgccggtgtaatacatggtggtcgagttcgccagcggcgacggatagaagttctgcacctggtcgagacggaagcgatgcttcttcagccacagcgccaggttcaccatatcttcatcacgggtccccggatgagcggagataaagtacgggatcagatactgctctttacccgcctgcttcgaataggtgtcgaacagctctttaaagcggtcgtagctgcccattcccggcttcatcatcttcgacagcggtccctcttcggtatgctccggggcgatcttcagatagccgccgacgtggtgggtcgccagctctttgatatagcgcggatcttcgaccgcgatgtcatagcgtaccccggaggcgataaggatcttcttgatgcccttcagttcgcgagcgcggcgataaagattgatcgtcggctcatggttggtatccatgtgcgggcaaatatccggatagacgcaggagagacggcggcaggtctgctcagcgcgcggcgatttacagcgcagcatatacatgttggccgttggcccgccgagatcggagatcaccccggtaaagccgggcacggtgtcgcgaatggcttcgatctcattaatgatcgaatcctcagaacggctctggattatgcgtccttcgtgctcggtgatcgagcagaacgaacagccgccgaagcagccgcgcatgatgttgattgagaagcggatcatctcatacgccggaatacgcgcatcgccataggaaggatgcggcacccgcttgtacggcagcgcgaagacgctgtccatctcttcggtggagagcgggattgccggcgggttgatccagaggtagcgctcgccgtgcttttgcatcagcgcccgggcgcagccggggttggtttcgtggtgcaaaatgcgcgaggcgtgagcgtacaggaccttatcgcctttcaccttctcgaaggaaggcagcagcacataggttttttcccacggtttgggccgcggcggttgcacagtaatgcttttcgcttcctgttttttcggcgcgaccggtttgttatcggcgcacggcagatcttcaccgtacggatgcgggatggggtcaattttaccgggcgtatccagacgggtggagtccacgccgctccagccgggcagcgcctctttcaccatgatggcggtattgcgcacatcgcggatctggtcgatggtttcgcccatcgccaggcgatgagccacttccaccagcggacgctcgccgttgccgaacattagcatatcggccttggagtccaccagcaccgagcggcgcacggtgtcggaccagtaatcatagtgggcggtacgacgcaggctggcttcgatgccgccgaggatcaccggcacatctttccacgcctctttacagcgctgggtatagacgagggtagcgcggtccggacgtttgcccgccacgttacccgccgtataggcatcgtcatgacgtagtttacggtcggcggtgtaacggttgatcattgagtccatgttgccggcggtcacgccgaagaacaggttcggttttcccagacgcataaagtcgtctttgctgttccagtcaggctgggagatgatcccaacccggaaaccctgcgcttccagcatgcggccgcagatagccatcccgaagctcgggtggtcgacataggcgtcgccggtaaccagaataatgtcgcagctatcccagccaagttgatccatctcttcacgcgacatcggtaaaaaaggcgcagggccaaaacaggcagcccagtattgcggccaggaaaaaaggtcacgatccggttggatcagggatattgcgctcatattgcttccggggaaaatgataaaaaaataaccaaaagggcgtggattataagccggaatgatagtggaaatgaaggaggattttctcaaaccctgaccgtgcgccggccagggtcaaagaggttacggcgcgggattcaccagcatctggccgatcgagccgcgatcggcaagctccagcgtctgactcagatactggaacgggaagtgcggccacgacggttgagcgtaatagaccagcagctcaacctgcccgtcgacccacacggtgtccttccagccgcgatcttccgggaaaggagacgagccgttgacattacggatctggaacatcaccccttcaatatggaacgactgcgggcggtcggcgcgcaccgtccagcgctcccaggtcccctgctgcgccgtgatatcgatacgctgcggatcccacagctggccgttgatgcccggatcgtcgccaagggtgatatcccggctgcggatcggcgtaccggagagcagctcggtcggcagcaggcgcaccggcagactgtcggtcaccagcggcagcagcccggtcggacgcagcgtcagcaccagcgtggagaccaggatgcttgacggttcaaaaaaaccgcggatacggtcgacgatgctcgccgcttcgccgcaggtaatggatacttcatcgccgttagtcatatcgaccagaatttcacgccgctcccccggggccagcgatagctgcttgagcgaaaccggcgccggcaagaatccctgatcgccggaaatcacatgcagcagtcggccatcgctcatctgcagctgatagcgccgggagttggaagcgttcagcaggcgcaggcgcacccagccgcgcgacacttcaacatacgggctctgcacgccgttaaccagcagcgtgtcgcccacaaagccgccgctgcccggttcgctatattccggcgtgccgaagttatccagccgtttatcctgaataatcaccgggaagtcatcgacgccatagtggttagggatcggcaggttcttgctgacctcgtcttccaccagccacatgcccgccagaccgttgtaaacctgtttcgccatccggttcggcgtgttggcctgataccacagcgtcgccgcgctctggcggataggcagcaccggcgcccagtcggcgttcggcgacatcatgcgcgccgcgccgccaatcagcgggccaggcacctgcagaccgcggatggtcatcgccacgttctccgtcaggcggttgctgtagataagcttgacgtcgtctccgttccagacgcggatcgtcggccccatatagcggccattgatcccccagacgggggcgcgggtgccgggggtaaacgaccagtgggaacgctgcagcgtcagaaacagcggctggccgcgacgagattccagcagcggcggaaccggcagcgcaggctgctggccggcggcatgggccttcagcggcgcggcgccagcgcacagcgctacgccggaagccttaataaactgacgccgactgagtgacatattaactccatgacatactgacaaatgaaaaagggaattcgtttcccgccagcaatacgcgcgcgttggcggcgtttcctgtcttattgctttccagccgcttcgcgctcggccacttcgttgtccagatcagcgattttggcggccatcagctcgcggcaatgcgtcgccagcgcgcgcacgttgtctttaccaaactgagtggtatctaccggcggcagcatttccacaatcaccagaccgttgttccagcgattgagctttattttattcgatgtattcgagacacacaccggaataatcggcaccccagcggcaatagccgcgtgaaaagccccggttttaaacggcagcaggccgcggccgcggctacgggtcccttccgggaacatccagaacgaaattttacgctttttaaaagcgttgacgacttcggcaatagtgccgtgcgctttggttcggttattacggtcaatcagcaaattgcccgtcagccagtacagttggccaaagaacgggatccatagcaggctctttttacctacggtgaccgtcggagcctgcacgatattcgacgccgtcaccatatcatagttgttctggtggttagcgatgtagatcgcgttgccatagctttccgcgtcggcgggtttgcgtagctctaccttgaggccaaataccggagataaacggccaaacagatggccgaaagtggcaacgtgttttggattacgtgggctgaacaagcagtacagacagccaagtacgcacactacgatgcaataaatgaccacgaaaattactcgaaaaatgaatagcatagctacctctaaaacccaaaccgcttagaattattcgctgctggcagaaggcaggctcacaagttctgcgcaggccgggaccgttcttcctgggtccctgatgatggacattgttaatcgcaacgcctgaataaacaacgattttgcggcattttttcgtctcctcccgtcaaagacgggaggagacgcgcttactcttcgctatcgcctgccgcggcacgacgcggcgagtcaatttccacgcggtcaattttctgcagcccgcgcatcagcgaaccgcggcggccgcgctcgccggtgactttttgcagctcttccggacgcagtttgatcttccgtttgccgacgtgaatggtcagcgtactctgcggcggcagaacaaacagatgtgccagaccgtcctggccggctgcggcttccgccgccggaatgctgataattttgttgcccttgcctttcgacagctgcggcagatcgctgaccgggaacatcagcatccgcccggcggcggtgatggccagcagcatatcggactcatcctcaatcaccagcggcggcatcacgtgcgcgttgtcaggcagggtgattagcgctttaccggcacggttgcgcgccaccagatcgttgaaggtacagacgaaaccgtagcccgcgtcggaagccatcagcagtttctgatcgtcgctttccattagcatatgctccacggtcgcgcccggcggcagggtcagtttgccggtaagcggttcaccctggccacgcgcggaaggcagagtaatcggatcgatggcatagctgcgtccggtggtatcgataaacaccaccggctggttgctcttgcccttcgccgaggctttccagctgtcgcccgccttatagctcaagccctgggcgtcaatgtcgtgtcctttggcgctgcgcacccagcccatctgcgacagaacgatagtcaccggctcagacggcagcatgtcatgctcgctcatcgctttcgcttcttcacgctcgtgaagcggcgagcgacggtcgtcgccgaaggcatcggcatcggcctgcagctcttttttcagcaggttgttcatcttacgttcagacgccagaatcgcctgcagctggtcgcgctctttttccagctcgctctgctcgccgcggatcttcatctcttccagtttggcgaggtggcgcagttttaattccagaatcgcttccgcctgggtttcgctgatgccaaagcgcgacatcagggccggcttcggttcatcttcagtgcggatgatctcaatcacttcatcgatattaagaaacgccaccagcaaaccttcgaggatatgcaggcgcttcagcactttctctaaccgatggtttagacggcgacgcacggtatcgcgacggaacaccagccactcgctgaggatctccagcaggtttttcaccgccgggcggccgtcaaggccgatcatattgaggttgatgcggtagctcttctccagatcggtggtggcgaacaggtggttcatcacctgttccatatccacccggttggagcgcgggacaatcaccagacgggtcgggttttcgtggtccgattcgtcgcgcagatcgtcaaccatcggcagctttttattgcgcatctgcgccgcaatctgctccagcactttggcgccggagacctgatgcggcagcgcactgatcaccaccgcgccgtcctctttactccacaccgcacgcatgcgcactgagccgcgcccgttctggtagattttgcgaatttccgcccgcgaggtgatgatctccgcctcggtcgggaaatccggcccctgtacgatatccagcagttcgtcgagggtggttttcggctgctcaatcagcgtaatcgccgctttggccacttcccgcaggttgtgcggaggaatatcggtcgccatgcctaccgcgatgccggtggtgccgttcagcaggatgttcggcagacgcgctggcagcattttcggctcctgcagcgtgccgtcaaagtttggcacccagtcgaccgtcccctgccccagctcgctgagcagcagctcggcatacttcgacaggcgggattcggtgtaacgcatggcggcgaaagatttgggatcgtccggcgccccccagtttccctgaccatccaccagcggatagcggtaagagaacggctgcgccatcagcaccatcgcttcatagcaggcgatgtcgccgtgcgggtgatatttacccaacacgtcgccgacggtgcgggcggactttttgaatttcgcgctggcgttcagccccagctcggacatcgcatagacgatgcgacgctggaccggttttaagccatcgccaataaacggtaatgccctgtccatgatcacgtacatggagtagttcaggtaagcattttccgtaaattcatgcagcgcaaggcgctctgccatatcgctcattaatcgtggatcctcaatctgggtaccgaccgttcggacggcaaaactacccgcgataatacccgatctcacgccctgagtcacaggccgtgagatcggctgaggattccgtcacgcttaatcaggccagcggcagataaatatcggtttgcagttcatgctcagccacctcatggacaaaattgaggtaacggaagtacaccggaaaatcccgtaacgtctcgcctgaagcgggtaaccagtcgcgatagagaaaccaaacgctgttcgccagcgtgtccagcgagccgtgatggcgcacgacggcgcagcgtccgccggggatttcgccgttaatcacgccaaaggcgttttcaccaaccggccgatcgaccgtaccgcagatatcaaaacgaaatgcctcctgcggggtggtctgcggatcgtcccaggcgatcccccaggtatcgctggtggcgacgggcgatagtccgctcgtcttacgccaggcgataaaacgcgcggcggtggcgttgacaaggtccgggctaccgcgatgttgcagtacggctatccgggtggaggggcacgaaataatgttgacgtccatcgacgtttgctcctgtagcgtatgtttcggtacgcgtcgatgccactcggcccagtccggttgttgacggaattgggtcgggctttggtcaaacgcggtacggaaggcacgactgaacgactccgcattctgaaatccggcatcaagggcaatatcgatgactttatcgcgggggttgaacgccaggcgccaacaggcgcgtcgcagacgcaaccactgaatataccggtacaatggaatgccggtataagcgctaaattgccggtgaaaatggtaaggcgaactgtgcgctatcgcgctcagcgtctccagcgacagcggctcatcaagatggcgcgcaatgtacctacagacgcgctggaagcgcccgacatacgccgggctggccttaatatcgttcatcgtctcctcctcgcgacatactctgacagagcgaggatcgcgattcctgaccgatcttgcgcttatccgacggagacttatggcgcgattttacggatctgtttaacgtcgatttctaccgagttccagtccttatcgacttccccctgaatttctactgtgtcctgcgggccgacggtcacgccgttccagcgcttgtggtcgatatcgacattgatcaccccggaagcatcctggaatttatacaggtcatcagagatgcgctcgacgattttaccgcgcagggtcacccaggtgtcatcacgcagcgacttggcgttcgccacggtggtcaccgcgccgctcggcccggtgaagccgccagcctgggtggtagtggtagtagacggtccggtgaatcctccctgcccggcggccagtaccggcatggaaactaaagcaataatcgcggtcatcgcagcaatttttttcatcttatattctcccttttgtgttggtatggctcctattacgcccgacaaaacttaacgacttcttaagcggaaaaaagaaattttaatgctgtacatcacccgcttcaacgcggtttactgcgcaaagaaacgggatcgtcggagggaaacatgcgcatattactggtggaagatgacaagcttatcggcgacggcatcaaagccgggctgagcaaaatgggctttagcattgactggtttaccgccgggctggagggcaaaaatgccttatacagcgccccctacgacgccgcaatccttgacctcaccctacccggcatcgatggcctcgatattctgcgcgaatggcgcgataaaggccgccatgagccggtgctgatcctcaccgcccgcgatgccctcagccagcgggtggagggcctgcgcctgggcgccgatgactacctgtgcaaacctttcgccctgattgaggtggcagcgcgcctcgaagcgttgatccgccgcgcgcacggccagagcagcagcgaactgcgccacggcaaggtgatcctcgatccgaaccgcttaaccgccagcctcgacggcgaaagcctggcgctgaagccgaaggagttcgccctgctggaactgcttatgcgcaacgccgggcgcgtattgccgcgtaagcttatcgaggaaaagctctacacctgggacgacgaggtctccagcaacgccgtggaagttcacgtccatcatctgcgccgcaagctcggcagcgactttatccgtaccgtccacggcatcggctataccctgggtgacgcatgaaacgacttgcccgcctgagcctgcgcctgcgcctgacgctgctgtttgccgtactgaccaccgccgcctggggaatggccagcgttatcgcctggcagcagaccagcaaaaagctggataagctgttcgatacccagcagctgctgttcgctcgccgcctgagcgtcatgcatttcgatgaactgcgcgccccgcccgccttgctcggggaaaagaaaaaggtacgccacgggcacatcgacgacgacgcgctggcgttcgccatcttcacccgcgacggcaaaatggtgcttaatgacggcgagaacggagaggatattcagtggaattcgcagcgcgagggattcagcgatggctatctgcgtgacgacgatgacgagtggcgtttcctgtggttaaccaccgccgacggccgctaccgcatcgccgtcggccaggagtgggattaccggcgcgaaatggcgatggatatcgtgacctcgcagctcaccccgtggatggttgccctgccgctgatgttcgtgctgctcatcgtgctgttaagccgcgagctggcgccattgaaaaatctggcgcgcacgctgcgcctgcgcgcgccggactcggcggattcgctcagcgtggagaagatccccgccgaagttcgcccgctggtcgaagcgctgaatcagctgttccgacgcactcacgacgccatgctgcgcgagcgtcggtttacctctgatgccgcccatgagctacgcagcccgctggcggcgctgaaggtgcagaccgaagtcgcccaactctccctggacgatcccgaagggcgtgagaaagcgttggatcagctccaccaggggatcgatcgcgccacccgactggtggatcagctgctgacgctgtcgcggctggactcgctcgcccaactggatgatgtgcagcaggtcgctatcgccgatctgctgcagtcggcagtgatggagatgtatcacccggcgcagcagtccgggattgagctgcgcctgcatcttaatgccagccatatcgtccgcaccggccagccgctgctgctcagtctgctggtgcgcaatctgctggataacgccgtacgatatagcccgtgcggcagccaggtcgatatcacgctcaacgcccgcgagttccgggtgcgcgataacggcccaggcattaacccgcaggcgctctcgcgcattggcgagcgtttttatcgcccgccggggcaggaggcgccgggcagcggcctgggcttgtcgatcgtccggcgcatcgcctcgctgcacggcatgcaggttgattttgccaacgcgcgcgacggcggcttcgaggcccgcgtgtactggtagcgagattattgctcatttggcaaaagactttgcacattttgctcattttactgccccgcttcgcggggtaagatcgtcggcaaattttcatatatgagggtaaaaaatgagcaacatcctgattatcaatggggcgaaaaagttcgcgcactctaatggtcaactgaacgacaccctgaccgaggtcgcggagagttatctgcgcgacgccgggcacgatgttaaaagcgttcgcgccgaaagcgagtacgacgtaaaagaagaagtacagaatttcctgtgggccgatgtggtgatctggcagatgccgggctggtggatgggcgctccgtggacggtgaaaaaatatatggatgacgtctttaccgaaggccacggctcgctgtacgccagcgatggccgtacccgctccgacgccagcaaaaaatatggctcaggcggcctggtgcaggggaaaaaatatatgctttctctgacctggaacgcgccgatggaagccttcaccgacaaagaccagttcttccacggcgtcggcgttgacggcgtttacctgccgttccataaagccaatcagttcctcggcatggaggcattgccaacctttatcgccaacgacgtgattaaaatgcctgatgtcccacggtatatcgcagaatatcgcaagcatctggcggaaatttttggttaactagaggtctagctctacatatttcgagttattcgaacctggagtatgacgagatccacacagaaggagttgagttaaccatgttaacagtgattgcagaaatccgtacccgcccgggccagcaccaccgccaggcggttctcgatcagttcgcgaaaattattccgaccgttttgcaggaggccggctgccacggctatgccccgctggtggatcatgccgccggcgtcagcttccagaccacagcgcccgactctatcgtcatggtcgagcagtgggaaagcgtcgcgcatcttgaagcacacctgcaaaccccgcacatgaaagcctggtcggaagcggtcaaaggcgatgtgctggagaccagcatccgtattctgcaggctggcgtttaagtccgccgactcagtaatgccatgaaaaagggagcctgaggctcccttttacgtctggcgcagcgtacagacttacacttccagatccgccatatcgcccttctcctgcagccagttgcgacgatcttccgaacgctttttggccagcagcatatccattatcgccgtggtctgctgctcgtcctcatcgcttatcaccagctgcaccaggcggcgggtattcgggtcaagggtggtttcgcgcagctgcatcgggttcatctcaccgagccctttaaagcgctggacgtttggcttgcccttcttgcgctttagctgctccagcacgccggttttttcttcttccgtcagcgcgtagtaaacctctttaccgaggtcgatacggtacagcggcggtagcgccacatagacgtgcccctctttcacgagggtacggaaatgtcttacgaacagcgcgcacagcagggtggcaatgtgcagaccatcggagtccgcatccgccagaatacaaattttaccgtagcgcagctggcttaaatcatcgctatccgggtcaataccaatcgccaccgaaatgtcgtgcacttcttgcgaagctaacacttcatcggaagagacttcccaggtattaaggatcttgcccttcagcggcatgatcgcctgatattcgcgatcgcgcgcctgcttggctgagccgcccgccgaatccccttcgacgaggaacagctcggtacggttcagatcctgggcggtacagtccgctagcttacccggcagcgccggaccgctggtcagctttttgcgcaccacttttttggccgcgcgcagacggcgctgggcgctggagatggccatctccgccagcagctccgcggcctgcacgttctgattcagccacaggctgaaggcgtccttcaccacgccggagacgaacgccgcgcactggcgcgacgacaggcgctctttggtttgcccggcgaactgcggatcctgcatcttcaccgacagcacgtacgcgcagcgatcccagatatcttccgctgacagcttcacgccgcgcggcaggatattacggtactcgcagaactcacgcatcgcgtcgagcagcccctgacgcagaccgttaacgtgcgtcccgccctgcatagtcgggatcaggttcacgtagctctcggtcagcagttcgccgccttccggcagccacagcagcgcccagtccaccgcctccgtctcgccggagaaggcgccgacgaatggtttttccggcagcagcggcaggccgttcaccgcttcgctcaggtaatcgttcaggccatcggcatagcaccagctctgctcgctgttgttcacctggtcgcggaaaacaatttccacgcccgggcacagcaccgctttcgcttttaacaggtgggtcagacgtgaaacggaaaagcgcgggctgtcgaagaagctttcgtccggccagaaatggacgctggtcccggtattgcgtttgccgcaggtgccggtgacgtgcaggtcttccactttttcaccattttcaaaggcgatgctgtagacctgaccgtcgcgacgcacgttgacctccacgcgttttgacagggcgttgactaccgagatccccaccccgtgcaggccgccggaaaactgatagtttttattggaaaacttaccgcccgcatgcagccggcagaggatcagctcaaccgctggcacgccctcttccgggtggatgtcgaccggcatcccacgaccatcgtcaatgacctccagggactggtcggcatgaaggataacttccacgcgtttggcgtggcctgccagcgcttcatccacactgttatcaataacttcctgaccaagatggttaggacgagtggtgtcggtatacatgcccggacggcggcgcaccggctctagcccggtgagtacctcaatggcatcagcattatatgaagattgcgtcatggtgtgtattcgtaggtcgttcagggccgtttagcgcaggccgagaaattcgataatctgagtgaaatgatcgtcaaagccgacaaatgcgtgattaccgccctcctctaccgtctgccggcaagaggcgtagtaatgaacggcctggcggtaatcaagcacttcatccccggtctgctgcagcagccagagtaaatccggcgcttcgagcgggtcgatttgcatgactttgagatcgtaaatatggcgagactctagcacatattgctgcccggtgtatggattctcattgtggccgagaaaattgtttagtagttcaaacggccgcaccgccgggttaaccaccaccgccggcagcataaagcactgcgaaagccaggtcgcgtagtagccgcccagcgacgaccctacgacccccagcggctcgcctccgtgctccagcacgatggactccaacagctccgccgtttccgccgggtaaggcggcaactccggcaccaccatggtgatctcaggatagtgctgcgccagccaggtctttaacgccgtcgccttcgccgagcgcggagagctgttaaagccatgcagataaaggagcgtcgccatcagtagccttctgaagcaatatccggatgaaacgcggcgccttccaggcggcacacttcggtggtcagcgtcccgtcagggtgaagctccagccagcgccagcccggtgacaccgtatccagagtgaaattggcacagtgcggtttaaactggacgcaggtcgacggcgtcgccatcatgcgccggccattccagtcgagatccagttcctgatgaatatggccgcacaaaagatgcttcacccgcggccaggcgctcaacgcgctgtccagcgcgccggcattgcgcagactatgctgatccagccagctgcagccggccggcagcggatgatggtgcagcaggagtaaggtatagcgctccggcgcctccgccagcttatgttcgagccactccagctggaagtcgctcagctcgccatggggaacgccaaacacctggctgtcgagcagcaggatctgccagcgatcgccgagaaacacgcgcttggcaggggaaatgcccgcctcctgcagggtgctgtacatcgccggctggaaatcatggttgcccggtagccagacgcagggtgcagcaaaactcgcgatgccctcagcaaaatgctgataggccgcggaggagtggtcctgcgccagatcgcctgttgcgacaatcagatcgcatggacgctgtgaggcatgaatggccgacagtacggcctgatagctatcccaggtattgatgcctaacaacgtttcatgcttttcagcaaacaggtgagtatcagtaatttgtaatatcctgactctggcctcaccagccagaggtaggtttaacaggctttccaaatggtgtccttaggtttaacgacgctaacaaaccggaatcgccatcgctccatgtgctaaacagtaacgcagccagtcggccaaaaactggttaatttgatgcttttcgtcgcgttgatgcaactttttattaggataatcatatcgcgctttgaagcgaaagatctgctgactcgaacacacttcggccaccatggcgtcatggtagaggcggacggtcatcgatggcaggctccagtagctcactgcaggcagagtctgctctattgccaccagagtagtgtagcgggtcgattcaactatcgttaaccgatactgcgcgcttcccacctgatagcttaccttctcacccgctgcatccgttcgcggcaacaggcggcgcaactgcgcgaagttggtctcgcacaggcgcatcatctcagggaagtcaggtgtataacgcttcattttgtccactcatttcgtaaattgtgataatgcaattgcagccattgcaaggcgatgacagaggctgcgttgtcgattttcccctcttctacccactggtaagcctgctcccgactcaccacatgcacccgaatatcctcgttttcctcggccaggccgtgaatgccttttgccgtcgatgcatcaacttctcccaccaggatcgataaccgttcgctggtgccgccgggactggccagatagcttaatattggtttcgtccgcccaacttcaagcccggcctcctccagcgcttcccgacgggcaacatcttccaccgtttcacccgcttcaatcatgccggcgaccatctccagcagccacgggctctcgctggtatcataggcggcgatacggatttgttcgaccagcaccacttcgtcgcgcaccgggtcaaagggtagcaagacggcggcgtgcccgcgctcaaaaatttcacgggtgatttcgccactcatgccgccgttaaacaggcggtggcgaaaacggtataaatcgagcgaaaaaaaaccacgatatagcgtttcgcgtgcaataatttctacatcatttttggagaaggtaattccctgctgcgtgggtttgctcattgtcatgtcctgcgaatctgaaattagggatttccaaaccgtttggctaccgttttacggcccgtatgttagattggtgcaaattaccgccggatggcacgtaacgccaactttttacggcggcagaatcgatacaatcagcggaatttttcttagaattagaccagcgctaaatgcttcacaacaaggaatgcaaatgaagaaattgctccccattcttatcggcctgagcctgaccgggttcagcgccatgagccaggcggaaaacctgcttcaggtttaccagcaggcacgcatcagcaaccccgatctgcgtaaatcggcagccgatcgtgacgccgcgttcgaaaagatcaacgaagcgcgcagtccattactgcctcagcttgggctgggagcggattatacctataccaatggctatcgcgacagcaacggcgtcaactctaacgtcaccagcggttcgctgcagttaacgcaggttctgtttgatatgtcgaaatggcgcgccctgacgctgcaggaaaaaacggcagggattcaggatgtcacgtatcagaccgatcagcaaacactgattctgaataccgcgacggcctattttaaagtgctggccgccatcgacacgctctcctataccgaagcgcagaaacaggctatttaccgccagttggatcaaaccacgcagcgctttaacgtaggcctggtggcgatcaccgacgtacagaacgcccgttcacaatacgatgccgtgctggcgaacgaagtcaccgcgcgtaacgatctcgacaacgccgtcgaaggactgcgtcaagtcaccggtaattactatccggagctggcctccctgaacgtgaacggcttcaaaaccaacaagccgcaggcggtcaacgccctgctgaaggaagcggagaaccgcaacctgtcactgctgcaggcgcgtctgagccaggacctggcccgcgagcagattcgtcaggcgcaggacggccatttgccgaccctgaacctttccgcctctaccggggtctcgaatacgcgttacaacggttcgaaaaccaataccccgctcgcctacaacgacagtgataacgggcagaaccaaatcggcctgaacttctctctgccactgtatcagggcggcgcggtgacctcgcaggtcaagcaggcacaatacaacttcgttggcgccagcgagcagctggaaagcgcccaccgcagcgtcgtgcagactgtgcgttcatcgtttaacaacgtgaatgcctccatcagcagcatcaacgcctacaaacaggcggtggtctctgcgcaaagctccctggatgccatggaagctggctactcggtgggtacgcgtactatcgttgacgtcctcgacgccaccactacgctgtataacgctaagcagcagctctcgaatgcgcgctacaactacctgatcaacgagctgaacattaagtcggcgttaggtaccctgaacgagcaggatctggtcgccctgaacaacacgctgggtaaacccatctccacctccgcagatagcgtcgcgccggaaaatccgcaacaggatgccaccgctgatggctacggcaacactaccgcggcggtgaagccggcgtccgcacggaccacccagagcagcggcagcaatccgttccgtcagtaattctcatactgtgatgcgcatcgcctgtccgtcggacaggcgatgcgttaaacgtaaggcaacgtaaagatcccccgcttagcgcccctcttcgcttcattttccaccactcatcctctatcctgagcgttaacacacgccataccactgggtcctggaagacaaatatgaaacggacaaaaaatattaatcattcgtcgttccgcaaaagctggagcgcacgccatctgacgccggtcgcgctggccgttaccgcggtctttatgctcgccggttgtgaaaaaagcgacgaaacggtgtcgctgtaccagaacgccgatgactgctccgccgccaaccctggcaaagcagccgaatgcaccacggcctacaccaacgcggtaaaagaggcagagcgcactgcgccgaagtatgccacccgcgaagactgcgtcgccgagtttggcgaaggccagtgccagcagacgccagcccaggcgggcgtcgccccggaaaaccaggcgcaggcgcaaagcagcggcagcttctggatgccgctgatggccggctacatgatgggccgcctgatgggcggcggcatggcgcaacagcagccgctgttcagctcgaaaaatccggccagcccggcctacggtcagtacactgacgccagcggcaagagctatggtgccgcccagccgggccgcaccatgaacgtgccgaaaactgcgatggcgccgaagccagccacaaccaccaccgtcacccgcggcggctttggcgagtcggtagcgaaacagtcgaccatgcagcgtagcgccgcaggctcaacgtcctcttctcgctcaatgggcggctaagcaacatggaaagagtcagtattaccgagcgcccggactggcgcgagaaagcgaccgagtacggtttcaacttccataccatgtacggcgagccctactggagcgaagaggcgtattacaagctgaccctcgcgcaggtggaaaagctggaagcggtcaccgctgagctacatcagatgtgcctccaggtggtggaaaaagtgatcgccagcgatgagctgatgaccaaattccgcatccctaaacacacctggggttttgtgcgccagtcgtggaaaaccaaccagccgtcgctctactcacgtctcgacctggcctgggatggcatcggcgaaccgaagctgctggagaacaatgccgacaccccgacctcgctgtatgaagcggccttcttccagtggatctggctggaagatcagctcaacgccggcaagctgccggcgggcagcgaccagttcaacagtttgcaggaaaagctgatcgatcgcttcggcgagctgcgcgagcagtttggctttcagctgctgcatatggcctgctgccgcgataccgttgaagatcgcggtaccgtgcagtatctgcaggactgcgccgctgaagcggggctggcgacggaattcctctacgttgaagatatcggcctgggcgaaaaaggccagtttaccgatctgcaggatcaggtgattggcaatctgttcaagctctatccgtgggagtttatgctgcgggagatgttctccaccaagctggaagacgctggcgtacgctggctggagccggcgtggaaaagcattatctccaacaaggcgctgctgccgatgctgtgggagatgttccccaatcaccctaatctgctggcggcctacttcagcgaagatgctcacccggagatggagaagtacgtcattaagccaatcttctcccgcgaaggcgctaacgtgtcgatcgttgaaaatggcaaagtggtggaggcagtagaaggcccgtacggggaagaaggcaccatcgtgcaggcgttttacccgctgccgaagtttggcgatagctatacgctgattggcagctggctcatcaacgaccagcctgcagggatcggtattcgcgaagaccgggcgctgatcacccaggatctgtcgcgcttctatccgcacattttcgtcgaataatgccgcgctccggcgacggtaaatgccgccggagcgcgctatcatcaggcgccaaccaacaccgacagcatgctcagcgagcccatctcgatgccatcgaccgggatcgtcatcgcctcaacgccatcccacgtccccaggacatacagcagcggcaggaaatgctccgccgtcggattggagagcgagcccccttcgtgtgccaggtagttaaccagcgggtgttgctcgtccagcccctgccattgcagattcgctttcacgtagttattgaaggactctgcccaagggtacggcgtgttctcgccatgccagcgggcggtgcgcaggttatgcaccacgttgccgctggccaccagcataatgccttcatcacgcagcgaggccagcttccgccccatttcgagatgccaggccggcggtttggtgctgtcgatgctcaactgaaccatcgggatatccgcctgcggatacattttaatcagcacgccccacgatccatggtcaaatccccaggcttctgtatcgagggtgaccggcaccggcgagagcagctccaccagccgttgcgccagcgccggagagcccggcgccggataatgcgtgtcatacagcgcctgcggaaaaccgccgaagtcatgaatggtcttcggcgtctccatcgccgttacgcccgtaccgcgcgtaaaccagtgcgcagagaccaccacgatcgctttcggacgcggcagggtttcgcccagttgagcccaggcgcgggtataacggttgtcttccagcacgttcattgggctgccatggccgagaaacaacgcgggcattcgggtacgggacatgatgatatccttagggtgtcaatgtgatgtgctcacattacgcgcttttgcgccaggataaactcagataaccatgatgatgatcgtcagaaaatttgaatgtaattcgcggtaaagggacgtgtcccgtacgcgcatcctcaggcaatatactcgtatgtaattattttcacagggagagaagcgatgtcatcacccttaatattgacgctgttagccggtagcgcaaccttcattggcgccatattcggcgtgattggccagaaaccctctaaccgcctgcttggcttctccctcggctttgccgccgggattatgctattgatttcgttgatggaaatgctgcctgccgcgctggccgccgagggcatgtcgccgctgctcggctacggaatgtttgttgtcggcctgctgggctactttggccttgaccgcctgctgccgcacgcccacccgcaggatctgatgactcccgccatgccgcgcccgcgcaacttacgccgcaccgctattcttctgacgctggggatcagcctgcataactttccggaagggatcgccacctatgtcacggccagcaacaacctcgagcttggcatgggcgtcgcccttgccgtcgccctgcacaatattccggaaggactggcggttgccggaccggtgtatgccgccaccggctcgcgcagcaaagcggtgctctgggccgggctttccggcatggcggaaattttgggcggcgtgctggcgtggttgattctggggagcctggtctcgccgctggtgatgggcgcgatcatggctgccgtcgccggaattatggtggcgctgtcggtcgatgaactgatgccgctggcgaaagagatcgatccgcaaagcaatccaagctacggcgtcctgtgcgggatgtcggtcatggggctgagcctggtggtactccagacgatgggcatcggttaaagcgcagaaacaacacagcccactaacaagtgggctgtgctcgggcgtagcgaaccgctatttagctggctttacgctcatgttcgcgacgataggccaccagatcttcaatcgtgactaccgccatattgtgctgctgagcgaacttgatgcactccggcgcgcgggccatggtgccatcgtcattggtcagctcgcacagcacgcctgctggtttaaagccagccagggtcacgaggtcgatagtggcttcggtgtggccgccgcgggtcagtacgccgcccggctgcgcacgcagcgggaagacgtgacctggacggttaagatcggaaggtttcgcgccgtcggcgatggccgcgcggacggtggtcacgcggtcggcagcggagacgccggtggtcacaccttcggccgcttcgatggtcacggtgaagccagtgccgtaggcgctggtgttgttctctaccatcatcggcagatccagctgtttgcggcgttcttcggtcaggcacaggcacacaatgccgctgccgtgacgaatggtcagcgccatctgctcaacggtcatggtttcagcggcgaagatcatatcgccttcgttttcacggtcttcatcatcaagcaccatcacgccgcggccttcgcgcagggcgttcaaagcgtgttccacacgttcaaaagcggtaccaaaagaagaaaggagcgtctgattcatggtaaaaaaacctcattaaaattatggttaccagaatcagggcagtcttaggagcgccggtttagcggcaaaagtcaacgcgagcgggcctgggcccgactgtgccgttactctctcccatccggactttaaccgtcggccccggaattacaccggatctgctgaccttcccgtagtcacgggaagcgctcgcgggctttcaacgccatggttgatttaccgccggtggggaatttcgccccgccctgagaataagcgagataactataacgctattgactatcctcggcaatgcataagcttcaaacatttctggtttataggcggcctggttcgcactacaatgatcaatcatccgacccgagcaggaaaccaccatgattgacccgaaaaaaattgaacaaatcgcccgccaggtccatgagtcgatgccaaaaggacttcgcgatctgggtgaggatgttgagaagaaaatccgccaggcgctacagtcgcagctgacccgtctggatctggttagccgcgaagagtttgacgtgcagactcaggtgctgctgcggacccgggaaaaactggcgctgctggagcagcgcctgaatgacctcgaaaaccgcccggcggcgacgccgggcagcgaagagcagcagtaaaaaacgggccccttggggcccgttttgcgtttggcttaatgggcggcttccgcctgactactcacctggcgacagtacagttcatagcgctggcaaaaccattcacgatgttcttcatccatattgccgacaatggcctgaagatcaactggctggccctgggcgtgcattctggcgaaactccgcgccaaaaaatcaaaattcttcattgaatacatatcgttatggttcatgcgcatactccttcagcggtggatgttctgatcagtcatatgccttttactcacttcagtatttacgcttaccttaacgcgatttgtacgaaaaatgcgcttaacatgattatttattgcgctaaatcattttccacatgattaaataaaaacggcccgcgatacgtctatcgcaggccgtgatgcttcaccgtacaaaccggtgaatagcgaaaagcttatttgtcgctatctttttgtattttcttaataatattggtagttgagcagccatcttcaaagttgagcaccagcacttcgccaccgttcgcccagacctcttcactgccggcgatctgctccggtttgtagtcgccgcccttgaccagcagatccggcaggatgccagcgatcaggcgctgcggagtatcttcttcgaaggagaccacccagtcgacggcttccagcgcccccagcacgatcatccgctgttccagcgggttcaccgggcgggtttcgcctttcagacgtttggtggaggcatcgctgttgaccgccacgatcagacggtcgcccagcttgcgcgcattcgccagataggagacatgaccggcatgcagaatgtcgaagacgccgttggtcatcaccactttctcgccgcgcttgcgcgccgccgcaaccgcctgtttgagctcctcttcgctcatcacgccaaagccggtctcagcccggccgcggaccgcgttttccagctcgacaggggaaacggtggatgtacccagcttaccgaccaccacgcccgccgcggcgttagcgaaatagcaggcctcttccagggtgttgccggacgccagggtcgccgccagtacgccaatcaccgtgtcgccggcgccggtcacgtcgtacacttcctgggcctgggtcggcatatgcagcggcggacgccccggctgcagcagcgtcatcccctgctcagagcgcgtcaccagcagcgccgacagttcgaattcggcgatgagcttcatgccgcgctcaacgatctgcgcttcatcctggcacttgcccaccaccgcttcaaactcagagaggttcggggtgagcaacgtcgcgccgcgatagcgttcgaaatcggtgcctttcggatcgatcagcaccggcacgcccgcttcgcgtgcgagtcggatcatggtctggacgctggtcagcgcccctttggcatagtccgaaaggaccagcgcgccaatagagcccagcgcctgctgaatgcgctcgtgcatcggctgcggatcgacgccggagaagccctcttcaaagtcgaggcggatcagctgttgattgcgcgacagcacccgcagcttggtgatagtcgggtgagtcgggacggagacgaagtcgcacttcacattgacgttggccagcgcctggctcagcgcgcgggcggcgtcatcaatcccggtcaatcccaccaggcgcgaggttgcccccagcgaggcaatgttcatcgctacgtttgccgcgccgccaggacgttcttcgatattttccaccttcaccaccggcaccggggcttccggggaaatacgactggtggggccgtaccagtagcggtccagcatcacatcacccaccaccaacactcctgcacgttcaaactccggcagcgttactttcatgactctctcctgcgagacgcaaactttgcgcgcgataatagcacacccgattttatagttaagccatcagccatttctgccagctggcgctgacctgctcgcgctcccggctgaaggcctctggcgccacgtgtcccggcagctcctgcagggccaggtgatggagcgcgtcacgcaaggtggtgtacgcgtgcgttaaggcgcgcgcttcctcttcgtccatgatgtcgttctgcgccagcagctcgagaatacgcacattatcagaccagcgggtcagcttcggcttgtcgctggcatagcgtaggaccagatactgggtaataaattcaatatccgtgatcccgccggcatcggctttgatatcaaaacgattgggatgcttgttgccgaggtgggcgcgcatcttctcgcgcatctcgcgaacctcggtctgcagggttgcgccctcccgcggggtggtcaggatatcgcgacgaatggcgtcaaagcgcgcctgcaacgccgggtcgccatagaccacgcgggcgcgcaccagcgcctgatgctcccacgtccaggcctcgttctgctgatagtcggcaaacgcgtcagcggtggtaaccagcatccccgccgcgccggaagggcgcagccgggcgtccacttcgtagagaataccggacgaggtgcgggtgctgaacagatgcatgatccgctgggccagccgcaggtagaactgacggccgtcaatctcccgctcgccgtcggtcatcacctccgccgggcagtcatggaggaacaccaggtcgagatcggagctgtagcccagctcccaaccgccgagcttaccgtagccgacgacggcgaagccgcgcccctggcgatcgtgcaggtgggtcggcaggccgtagcgagccaccatctgcccccatgcctgctgcaccaccgcatcgaggatcgcttcggcaagccaggttaaatggtcgctgaccttcatcaccggcagggtgccggcgatatccgccgccgcgatatgcagctgctgcgcctgcttgaactggcgcaacgcctccagctgctgctcttcatcctcttccggcacccgcagcagatactgacgcagctcgtcgcgataggcatcggtcgccgtcggctgatagagggtgttgggatccagcagctcatccagcagcagcgggtggcgcgccagctggctggcgaccatcggcgatgccgcgcagagcgtaatcaggtgtttcagcgcgccggggaattcgctcagcagttcaagataggtggtgcgggtgacgatgccggtcaacagcggcgtgatccgcgccagaggcagcggcgcatcggcgcgcgagcagatttcgctcagcagatgcggcatcagctgatccagcacctggcggccgcgcgggccgatggtgcgccgatccagctctttgcggaaatcggcaatcagcgccagcacgctgcggcggtcggcgtcgtttaaatgcgccagcgccggactggcgtcatcttcttccagcgcatcctgccacagctcgcgccagtactcggccagctgctcatctggcgactgagcctcgtcatcgccgatcagttcattaaacacccgccgtacgttggccatatggttcgccagctgcgcgctcagcgtctcccagtcatcggtatgcatcccccacgccagtctggcgcggttcagttcatcctgtggcagggtctgggtctgttcatcgttgatactttgcagcaggttttccagccggcgcaggaacagataggccgcgcgcagcagcgtcgcgtcgccttccggcagcagatgcagctcatcaatcgccgccagtgtcggcaatagcgcgcgctgctgcagcgcaggttcgcgaccgccgcggatcagctgaaagacctgaacgataaattcaatttcacgaatgccgccggcgccgagcttgatgttgtctttcagcccgcgacgccgcacttcacgggcgatcatgcctttcatgttacgcagcgactggatcacgctgaagtcgatatagcggcggaagacgaaggggcgaagcatcgcgcgcagttcgctggcgtaggcgccgtcgttatcgcccatgatccgcgctttcaccatcgcgtagcgttcccagtcccgcccctgctcctggtaataatcttccagcgccgcaaagctgagcaccagcggcccgctgtcgccaaacggccgcaggcgcatgtccacccgataaacaaagccgtcctgcgtcggctggtcgagcgccttgataagccgctgccccaggcgggtaaagaactgggcgttatccagctcgcggcggccgccgcgggtggcgccatgctccggccaggcaaagatcagatcgatatcggaagagaagttcagctcgccgccgcccagctttcccatcccgaggatcagcagcggctgcggctgaccctcggcgttgcatggcgttccccactctttacagcaggcggcgtacagccagtcgcgggcggcgacaatcagggtctccgccaggacgctcagctgctgcagcgtctcttcttcgcgcaccagcgacagcgcctgcgcccaggcgatgcggaccatcatctggcggcggaagagacgcagctctcgcatcaaccccgcttcgtcagtgacggcctgcaggcgctcctgcagccaggcttcgtaatgccgccactcttccgccgccggcgcggagtccgcaagctcattcagccagcccggctgagcgatcacactctgttcgacaaaatcgctgaatgccatcaccgacctggcctgtgggctcagttcggcaacgggaaaatccgttggcagacggtcagcgaccgtctgccagtgctgctgtaactgcggagaaagcggcatcataagggctccctggcctgtaattatcgttttccactatgcagccagaacggctcggcagccagcgcctggcgacggaaatattcaaacacgctgcggtcgtcatgctctatcgcacgctgaagttcctgccagttctccagccacggcgcgacggcgtcgccataggcgcccgccagcagctggacgctgtcgatgtcgcgggacagcttcggcaactggtcagcggcatcttctaccgccagatgctgcacggcgctgcgcagctcggccgccacccgcgagaggtgaatatcggcaaaccgtttgaacgagccggctatttttttctctcccgcctcgttgaggaacggacgccagccgcgctggaccagccattcggtcagggccagtttggcgccaacgacctcggtgcggaataacgcttcgtcggcggtgtccgcagccagcagaacggcgtcggcgtcgttcagcaacgcgcggaggtgggtggtcgccttacgcggcacgatgccgccgaacagcacgagggcatggcgcacgcgggctatcgccagcagaatttccgctttggcttttgcgttgccgcgcagccagatctcgtcgtgatacagccaatgcgccagggcgctctccagcgccgcctccagcccttgctccacgctggccttcgctgccaccggcagcaccgccagccgggtcaccggacgctcattgttaccttgcgccagatgatacccgcgcgcggctttgctcaggctcccctgacgcaggacgccgctctccagcaaacgatgcgcgaggcgcagcagatcggcggtctccccggcgagcagctccagctccagttcgcagatcggctcctgatgttcgcccgcctttacttcgccgcgatcgagggcaatctcaatctcactctttccttcctggatcacccagcgttcacgggcaaaatcggtgctgaacagcggctggacatgctccgccagcgcggccggaagttccccttgcggccagacctccgccggcaggcgctcaagcgccagctccggtttatccagtggaatattatattccgggcgctggtgcaggccgccgaccacccgaccggcgattttcagcgtcatctcataacgcccctgatcgccgcggatgcgcaggcccatatcgtgacgacgcagccagttatcggcggtttcgtaataaatgttcagcaactggcccgcgggcgtatgtttcgcctcgagcgcattgagctgctcgcgcagcgtctctaccccatcctgagcgacgataaacttgagttcgatttcttgagccatgactgaattcttccgcttctgtgctgcgccgacaaattgcggcgaacttacgacgatattttttgtcagtagatagtattttgcggtgaatcgccatgcaacgcgctttttgccgggccacctcttggatgattccgattgtggcggaaaactttgcgtcgctctggcgatgcctctactatcgttccactttttatgaccaaacgatgacctgatgccaaaattacgcctgattacttttactttgctcgcgcttagcgccgccacggcggttcacgcagaagaaaagcgctacgtttccgatgagctgaacacctgggttcgcagcggcccgggcgataattatcgtctggtcggcaccatcaacgccggggaagaagtgtcggtactgcaaacgaacgacagcaccagttacgcgcaaattcgcgatagcaacggccgtaccgcctggatcccgctgaaagagctgagcaacgagcccagcctgcgcacccgcgtcccggatctggaaaaccaggtcaagacgctgaccgataagctgaataacatcgatgccacctggaaccagcgcacggcggatatgcagaagaaagtcgccggcagcgacagcgtgattaacgcgttgaaggacgagaaccaaaagttgaaaaacgagctggttgtcgcgcagaagaaggtgaatgcggcaaatctgcagcttgatgataaacagcgcaccattatcatgcagtggtttatgtacggcggcggtgtgctgggcgtcggtctgctgctcggtctggtgctgccgcatctggtgccaagccgcaaacgtaaagaccggtggatgaactaattcgtcttctctgccagacttacgtatcatcttgcgaaaaacggatacgggagaatcaggcgtgaagagttatctggtcggtggcgcggtgcgtgacgcgctgctagggctgccggtcaaagaccgagactgggtggtggtgggcgccaccccgcaacagatgctagacgcgggctatcaacaggtaggccgcgattttcccgtgttcctccatccgcaaagccgggaagagtatgccctggcccgcaccgagcgcaaatccggcgcgggctataccggttttacctgctatgccgccccggacgtcaccctcgaagccgatctgctgcgccgcgacctgacggtcaacgccctcgcccaggatgccgacggcgcaattatcgacccctacggcggacagaacgatctccgtcagcgcctgctgcgccatgtctctcccgcgtttagtgaagatccgctgcgcgtgctgcgcgtcgcgcgctttgccgcccgctacgcccacctcggttttcgcattgccgaagagactcaggccctgatggccgcgatggttgaggccggcgagctggcgcatttaacgccggagcgggtgtggaaagagacggaaagcgcattaactactcgcaacccgcaggtctttttccagacgctgcgcgactgtcaggccctcaaggtgctgttcccggagattgacgccctgtacggcgtgccggccccggcgaaatggcatccggaaatcgacaccggcctgcacaccctgatgaccgtcacgatggccgcgatgctgtcgccggatgtcgacgtacgtttcgccaccctgtgccatgacctcggcaaagggctgacgccgaaggcgctctggccgcgtcaccacggccatggtccggcgggagtcaagctggtggagcagctctgcgcgcgtctgcgggtgccgaacgatatccgcgatctcgcgaaactggtggcggagtaccatgacctaatccacaccctgccaattctgcagccgaaaacccttgtcaaactcttcgacagcattgacgcgtggcgcaaaccgcagcgcgtgcagcagatcgcgctcaccagcgaagccgacgtccgcggacgcaccggtttcgaggccagcgattacccgcaggggcgcctgctgctggaggcctgggaagtggcgcagtcggtctccactaaagaggtcgtggcggcgggctttaaaggggcggaaattcgcgaggagctgacgcggcggagaattgcggcggtagcgcagtggaaggaacagcgttgcccccagccgcaaggctgagggcgcaggccttagaagaagaccacgtacaccgctgccgcgacgataaagcggtagatagcgaacggaatgaacgagatccgtttgatcagctgcaggaaggttttaatcgcaatcagcgccacgataaacgccatcacgaagccgacggcgaacatcgggacatcgcccatgttcaggaagccgatgctcttgtagacgtccagcacggtggcgcccatcatcatcggtaccgccagcaggaaagagaactccgaggccgcatagcggctgacgcccatcagcatgccgccggagatagtcgcccccgagcgggagaaacctggccacagcgccaggcactgaaagcagccgatgacgaacgcctgacggtaggtcatatcgtcaatcccgaccgcgcgcggctgtttcggcttcagcacttccgctgcaatcagcaatacgccgccgacaatcagggcgtacatcacgttcaccgggttaaacaaggatttaatggtgtcatggaaaatcagccccatcaccaccgcggggatcatgccgagaaggatatggataagcgacaaacggccgctgccctggccttcatgcgccggcggtttcccgaaatggatgccgatcaggccgaacaggcgacgccagaacatcaccaccacggcgagtatcgaacctaactgaatcaccacttcaaaggtatttgcggtatcaccttcaaaccccagcaggtgaccaacaataatcatatgaccggtactggaaacaggtaaaaactctgtcaaaccctcaaccacacccaatattgccgccaccagcagcgagtgtatatcgctcatccaattaaaccctttaaaaaagtaaaatgaaaaaaaccaggaacacggtatcgttcaacaggcacaacccggctgccagagcgcgcgtaatccgcagcgtacagtaagtacacacggattcgtccaccgttctggaaggacatcgccagtaaaattgcctgatgaccggatgctatgaccggtataaacgcaatttgtttaacaagtatgacctgaaaagttttgtttcagattaaggccacgttcaataatcaccccgacgtttgccgcgcgagccacggcgccaggtttgctgacttttatgcgcacccatggcgactggaatgtttccagcagcaggtcggccacctcttccgccacccgctccactaacgcaaatttccccccctccacatgcgcgatcacgcgctcgctgatatcagcatagctgaggcaatcgctgacatcatcgctggcggccgccttgcggttatcccatgcaatttcgatatcgaacaccagcttctgctcaatggtttgttcccagtcataaacaccgatggtggtgattaccgaaagttgctctataaatacaatatccatcacgccctgcctgctttttagctaaaccggataccacttccggcgaattatgcgtattatccacagatgcagagaatacaacgacattttcaaaacggaacagcgttatgagtgcaatcgcgcctggactggtactcctcgcctacctctgcggctccatttccagcgccattctggtatgtcgccttgctggcctgcccgacccacgcgacagcggctcaggcaaccccggggccactaacgtactacgaattggcggaaaaggggcggccgtagcggtacttatttttgatgtgctgaagggcatgctcccggtgtggggcgcctgggcgctgggccttacgtcgttctggctggggttagtggcgattgccgcctgcgtgggccatatctggccagtcttctttcatttccgcggcggtaaaggcgtcgccacggccttcggcgctatcgcccccatcgggctcgatctgaccggggtgatggccgggacctggctgctgaccatcctgctcagcggttactcttccctgggcgctatcgtcagcgcgctgatcgccccgttctacgtctggtggttcaaaccgcagtacacctttccggtgtcgatgctctcctgcctgatcctcctgcgccatcacgacaacattcagcgtctgtggcgccgccaggagagcaaaatctggacccgcgtgaagaagaaaaaaacgccagagcagaagtaatctcccctcccggctccgccagccggggaactcccctgcgctaatcgcgcctttcatccgcccttttacgcctcctcgccatcaaaggcgatcatcgccgcctcccccttttgtaacaatacgttagcagcatggaaaggcaaaagttgcgctggcggctggcggcgcagcgcaacccgatccgccgccttttccgccgcgcccaggctgcggatcaggatattgacggcaaagattatccgggtgaataatccggagcggttatgccgctttcccctcgcgcccgtcgcgacgctccgggttacggatgacataagcgtttcgtatgaccgggataaactcccgccgatcaatactcattgctgctgttttatcttgattttgcaggggcgcaacattgcacggcaccgtgttaccaccactcaaaaaaggctggcaggctacgctggatctccgctttcaccaggccggcggcaagaccgttctcgccagcgcccaacacgtcggcccgctgaccgtccagcgcccgttttacccggaagaagagacctgtcacctctatctgcttcacccgcccggcggcatcgtcggcggtgatgagctgacaattagcgcgcaccttgcccccggctgccatacgctgataaccatgcctggcgccagcaagttttaccgcagcagcggcgcgcaagcgctagttcgccagcagttgacccttgccccgcaggcgaccctggagtggctcccgcaggatgccatcttctttcccggggcgaatgcccggctgtttactacctttcatctttgcgcctccagcaggctgctggcctgggatctgctctgccttggccgcccggtgattggcgaaaccttcagccacggcaccctcagcaaccggctggaggtatgggtggacgatgagccgctgctggtcgagcgcctgcagctgcaggagggagagctctccagcgtcgccgaacgtccctgggtcggcactttgctgtgctatccggctaccgatgccctgctcgacggggtgcgcgacgcgctggcgccgctcggcctctacgccggcgccagcctgaccgaccgcctgctgacggtgcgtttcctcagtgacgataatctgatttgccagcgggtgatgcgcgacgtatggcagtttctgcgccctcatctcaccggtaaatctcccgtacttccccgaatctggctgacttaagagaacgttatggaactgaccccccgagaaaaagacaagctgttgctgtttaccgccgcgctggtggcggagcgtcgcctggcccgcggcctgaagctcaactatccggagtccgtggccctgatcagcgcctttattatggaaggcgctcgggacggcaaaagcgtggcctcgctgatggaggaaggccgtcatgtcctgacccgcgagcaggtgatggagggcgtcccggaaatgatcccggatatccaggtcgaagccaccttcccggacggctcgaagctggtcaccgttcacaacccgattatctgaggtagcgccatgatccccggtgaatatcacgttaagcccggtcagatagccctgaataccggccgggcaacctgtcgcgtggtcgttgagaaccacggcgatcggccgattcaggtcggttcgcactaccatttcgccgaggttaacccggcgctgaagttcgaccgtcagcaggccgccggctatcgcctgaatatcccggcgggcacggcggtacgctttgaacccggccagaaacgcgaggtcgagctggtggccttcgccggtcaccgcgccgtcttcggcttccgcggcgaggtcatgggccctctggaggtaaacgatgagtaatatttcacgccaggcctatgccgatatgttcggccccaccgtcggcgacaaggtgcgcctggcggataccgagctgtggatcgaggtggaggacgatctgaccacctacggggaagaggtcaaattcggcggcggcaaagtgatccgcgacggcatgggccaggggcagatgctggccgccgactgtgtcgacctggtgctcaccaacgcgttgatcgtcgatcactgggggatcgttaaggccgatatcggcgtgaaggacggccggatcttcgccatcggcaaagccggtaaccccgacatccagcccaacgtcaccatccccatcggtgcctcgacggaagtgattgccgccgaaggaaaaattgtcaccgccggcgggatcgatacccatattcactggatctgtccgcagcaggcggaagaggcgctggtctccggcgtgaccaccatggtcggcggcggcaccggcccggccgcgggcacccatgccaccacctgcaccccgggcccgtggtatatctcacgcatgctgcaggcggccgacagcctgccggtcaatatcggcctgctgggcaagggcaacgtttctcagccggatgccctgcgcgagcaggtggcggcgggcgttattggcctgaagatccatgaggactggggcgccaccccggcggcgatcgattgtgcgttaaccgtcgccgatgaaatggacatccaggtcgccctgcacagcgacaccctgaatgaatccggttttgtggaagacaccctcgccgccatcggcgggcgcaccatccacaccttccataccgaaggggccggcggcggccatgcgccagacatcatcaccgcctgcgcccacccgaacattttgccgtcgtccaccaacccaacgctgccctacaccctcaacaccatcgatgaacatctcgatatgctgatggtctgccaccatctggacccggacatcgctgaggacgtggcctttgccgagtcgcgcattcgccgggaaaccatcgctgcggaagacgtgctgcacgatctcggcgccttctcgctcacctcctccgattcgcaggccatgggccgcgtcggggaagtgattctccgcacctggcaggtggcgcatcgcatgaaggtgcagcgcggagcgctggcggaggagaccggggataacgacaacttccgcgtgaagcgctacatcgccaaatacaccatcaacccggcgctgacccacggcatcgcacacgaagtcggatccattgaggtgggtaagctggctgacctcgtggtctggtcaccagccttcttcggcgtgaaaccggccaccgtgatcaaaggcggcatgatcgccatcgcgccgatgggcgatatcaatgcctctattccgaccccgcagccggtgcactaccgcccgatgtttggcgcgctgggcagcgcccgccatcactgccgcctcaccttcctgtcgcaggcggcggcagccaatggcgttgccgagcggctgaacctgcgcagcgcgatcgccgtggtgaaaggctgccgtacggtgcagaaagccgacatggtgcacaacagcctgcagcctaacatcaccgtcgacgcccagacctatgaggtgcgggtggatggcgaacttatcaccagcgagccggcagacgttctgccgatggcgcaacgatattttctgttttaaggagagcggatgctttatttaactcaacgtctggagatccccgccgccgcgaccgccagcgttacgctgccgattgatgttcgcgtcaaaagccgggttaaggtcaccctcaacgatggccgggaagccggcctgctgctgccccgcggcctgctgctgcgcggcggcgatgtgctcagcaacgaagaaggcaccgagtttgtgcaggtgattgccgctgatgaaggggtgtcggtagtgcgctgcgacgatccttttatgctggcgaaggcctgctaccacctcggcaaccgtcacgtgccgctgcagattatgccgggcgagctgcgctaccatcacgatcacgtgctggacgatatgctgcgccagttcggcctgacggtgacctttggccagctgccgttcgagccggaagccggcgcttacgccagcgagagccacggtcatcatcatgctcatcatgaccaccacgctcacagccactagcatgtcgacagcggaacaacgcctgcggctgatgcagctggccagcagcaacctgccggtagggggttacagctggtcccaggggctggagtgggctgtggaagccggctgggtgctggacgtcgcggccttcgagcgctggcagcgacgccagatgacggaaggcttttttaccgttgacctgccgctgttcgcccgcctgtaccgcgcctgcgaacaaggcgatatcgctgcggcccagcgctggaccgcctatctgctggcctgccgggaaactcgtgaactgcgggaggaagagcgcaaccgcggcgcggcgtttgcccgtctgctgagcgactggcagccggactgtccgccgccgtggcgctccctgtgccagcaaagccagctcgccgggatggcctggctcggcgtgcgctggcgtatcgccctgcccgagatggccctcagcctgggctatagctggattgagagcgccgtgatggccggcgtcaagctggtccccttcggccagcaggccgcccagcagctgattttacgtctttgtgaccactacgcggccgagatgccccgcgcgctggccgcgccggacggcgatatcggatcggccaccccgctcgccgccatcgcctctgcccggcatgaaacccaatactctcgattattccgttcctaggagaagccatgaactcttataaacacccgctgcgcgtcggcgtcggcggcccggtcggctccggtaaaaccgctctgctggaagcgctgtgtaaagcgatgcgcgatacctggcagctggcggtggtcactaacgacatctataccaaagaagatcagcgcatcctcaccgaagcgggcgcgctggcgcctgaacgcatcgtcggtgtggaaaccggcggctgcccgcatacggcgatccgcgaagatgcctcaatgaacctcgccgccgtggaagcgctgagtgaaaagttcggtaacctcgaccttatcttcgtggaaagcggcggcgataacctgagcgccaccttcagcccggagctggcggatctgaccatctacgtcatcgatgtggccgaaggggagaagatcccgcgcaaaggcggaccggggatcaccaaatccgatttcctggtgatcaataaaaccgaccttgccccctatgtgggcgcgtcgctggaggtgatggcgagcgatacccagcgtatgcgcggcgatcgcccatggaccttcaccaatctgaagcagggcgacggcctgagcaccattatcgccttcctcgaagacaaaggcatgcttggcaaataggcctgttgcaccagccgggcgcaagcgcgtccggatggtgcagcctctgctctctctttatatcatcctgcctccacctccgcgccacgcctgccctgcaatatggcataaggtttgctaattcaagtcatgcctaaccattaaggaatgactatgtcatcactggatcttaaccctgaattacccgcgacaacgcggacttccggtacccgggaaaccttagaagattacaccttacgttacgccccgctgagcttccgccgctggggtccgggcgtcgtcgcggtcaccgcgctgggcggcatcgcctatctggccgacttttccatcggcgccagcatcggtatggcctggggcaccagcaacgccatctattcgatcctggtggcggcgctggtgatcttcctcaccggcattccgctggcgatcaccgccgcgcgctacaacattgaccttgacctgatcacccgcagcgctggcttcggctatttcggctcggtgatcaccagcattatttttgccggcttcacctttatcttcttcgccctcgaaggctcgatcatggcccagggcctgctggtgggcctcgggatcccgctgtggatgggatatctgatcgccaccctgatggtgctcccgctggtggtctatggcatgaaagccctgacccgcctgcaggtgtggaccacgccgctgtggctggtgctgatggtggtgccggtggtgtggctgattgtcaaagatccgcagctggtggacggcttcctgcatttcgccggtaaaaacagcgcgtcgacggtggatattaccgccatcatgctcggcgctggggtatgcctgtcgctgatcatgcagattggcgagcaaattgattacctgcgctttatgccgcctaagaccgcggagaatcgtaaaagctggtggctggcggtcttttccgccggtccgggctgggtggtgttaggggcgatcaaacagatcatcggcgccttcctcggcttctatctgttgacccgtttcccggcggtgcacaataccgaaccggtgcagcagttcgtcagcgtcttcgataacctggtgcccggctggctggccctgacgctggcggtggtgctggtggtgatctcgcagatcaaaattaacgtcaccaatgcctactccggctcgctggcgtggaccagcgcctggacccgcaccaccaaacgctatccgggacggattatttttgtggtggtcaacctggcgattgccctggcgctgatggaaggcgatatgttcagcgccctgtcgtggatcctcggcttttactccaacttcgctatcgcctgggtcgtggtggtggcgaccgacatctcctttaataaaggcttgctcaagctggcgccggcgcagccggagtatcgccgcggcatgatctacaacgttaacccggtgggcgtggtctcctttggtctggccgccgggctgtcgatctgcgccttcttcggtctgctgggggcgacgctggcgccgttctcgccgctgattgcgctggtcgttgcctttgtcatgaccccgctgatggggctccttacccgcgggcgctactatattaagcaggtggatgacggcatcgccgagccgcgctatgacgcggcggggaacgcctccaccaccgtgtatcaatgcgttagctgtgaggaagagtacgagcgcccggacgtgatgcactcgcacaagcatcagggagccatctgctcgctgtgtaaaagtatggagtagtcaggaaggcaggccgacgtgacgtcggcctgtttcaggatgcgttaggcggcaggcagctcggccagcggccagcgcgggcgaaccgtcacgccgagctcggctttggcgccggtttgcagacgcaccatgccggcgtaggcgatcatcgcgccgttgtcagtacagaactcagggcgggcgtagaacacctcgccgccgcgtttttgcatcatctccgccagcttcgcccgcagggtacggttggcgctcacgcctcccgccatcaccagacgcttaaagccggtttgctccagcgcgcggcgacatttaatcattagtgtatcgacgaccgcatcctcaaacgcccgggcgatgtcggcgcgggtttgctcatcgtcgccgttgctgcgaatggtgttggcggcgaaggtcttcaggccggagaagctgaagtccagccccggacggtcggtcatcggccgcgggaagacaaagcggccttcggtgccctgggacgccattttcgacagcatcggcccgccgggataatccagtcccagcagcttcgccgtcttatcaaaggcttcgcccgccgcatcgtcaatcgactcgcccaacagttcatactgaccaataccggtgacgctaatcaactgggtgtggccgccggaaaccagcagcgcgacgaacgggaacgccggcggattatcttccaacatcggcgccagcagatgcccttccatatggtgtaccgggatcgccggcacgttccaggcgaaggctagcgaccggccaacggtcgccccgaccagcagcgcgccgaccaggcctggacccgccgtataggcgacggcgtcgatatctttcgccgtcagaccggcttctttcagcgccgcctggatcagcggcaccgttttgcgcacgtggtcgcgcgatgccagctccggcaccacgccgccgtaatccgcatgcagtttcacctgactatacaattggttggctaacagaccttgctggtcgtcataaatcgcgatgccggtttcatcgcaggatgtttcaatgcccagtacacgcatgagttgttttacctcgcttcaataccgcgcagtgtaggtccaatgaccggcgatgtaaaactttgctcacccctggtgctctcttcgtgtatactcctcacccttataaaagtccctttcaaaaaaggcgccggtgctttacaaagcagcagtagttgcagtaaaattccgcaccattttgaaataagctggcattgcggccagcggcaaaccgaattaatcaaaggtgagaggcacatgccggtaattaaagtacgtgaaaacgagccgttcgacgtagctctgcgtcgcttcaagcgttcctgcgaaaaagcaggtgttctggcggaagttcgtcgtcgtgagttctatgaaaaaccgactaccgaacgtaagcgcgctaaagcttctgcagtgaaacgtcacgcgaagaaactggctcgcgaaaacgcacgccgtactcgtctgtactaatctgttgagagcgacgctctcaattcagaccgagttgtagttgtaaggccgtgcttccgaaaggaatgcgcggcttattttcgtttatagtcatcagaaataacggggcttatggctggacgaattccacgtgtatttattagcgatctgcttgccagaaccgacatcgtcgatctgatcgatgcgcgggtaaagctgaaaaagcagggcaaaaattttcacgcgtgctgtccgttccataacgaaaaaaccccctctttcaccgtcaacggtgaaaaacagttttaccactgcttcggctgcggggcgcacggcaatgctatcgacttcctgatgaactacgacaagctcgagttcgtggaaacggtcgaagagctggccgccatgcacaacctcgaagtgccttatgaagcaggcaacggacccagccagatagagcgccatcaacggcagaacctctaccagttactggatggtctgaatgcgttttatcaacagtctctgatgcagcccgccgccgatcctgcgcgccagtacctggcgaaacgggggttaagcagcgaggtgattacgcgctttgccatcggctatgctcccccaggttgggataacgttttaaaacggtttggcggcaatcaggaaaaccgccagtcgcttattgatgccggcatgctggtcaccaacgatcagggacgcagttacgaccgcttccgcgaacgggtgatgttccccatccgcgataagcgaggccgggtgattgggtttggcggacgggtgctgggcgatgccctgccgaagtatctgaactccccggaaaccgacatattccataaaggccgccagctgtatggcctgtatgaagcgcagcaggataaccccgaaccaccgcgtttgctggttgtcgaagggtatatggacgtcgtggcgctggcgcagtacgacattaattatgccgtggcctcgctgggtacctcgaccacggccgaccatatccagctgctgttccgggtgacgaataacgtcatctgctgctacgacggcgaccgggccggccgcgatgccgcctggcgcgcgctggagacggcgctgccgtacatgaccgatggtcgccagctacgctttatgtttctgcctgacggcgaagacccggatacgctggtgcgtaaagagggcaaagcggcgttcgaggcgcggatggagcaggctcagccgctctccacgttcttgtttaacagcctgctgccgcaggtcgatctgagtactccggacgggcgcgcgcagctgagcacgctggcgctgccgctgataacccaggtcccgggcgaaacgctgcgcatctatttgcgtcaggagttgggcaataagctgggcattttagatgacgcgcagcttgaacgattaatgccaaaacaggcggaaaatggcgcgccgcgtcccgcaccgcagctaaaacgcacgaccatgcgtatactgataggactgctggtgcaaaacccggatctggcgccgttagtcccgccgctggagggactggactcgcgcaaaatgccgggactgagcctgttcaacgaactggtgaagagctgtctggcgcagcctggtctgacaaccgggcaacttttagagcaatatcgcggcacaaaagaggcggcaacccttgaaaaactgtcgatgtgggacgatatagcagataaagacatcgctgaacaaaccttcaccgactcgctcaaccatatgtttgattcactgctggaactgcgacaggaagagttgatagctcgcgatcgcacacacggtttaagcagtgaagaacgccgggagctctggaccatcagccaggagctggcgaaaaaataaatgacagacaatatccttcacgttgtatcaaagcagtaagaaaacgcagaacaacgtgaaggaaaagtatttaacggcttaagtgccgagtatcgatcgggaagcccccgacagccgcgcagaggcgcagcggcaataatataagtacgccctcgctttaaatgtcgacagcccgtctgccgacaccaatcaaacgaattaagtgtggataccgtcttatggagcaaaacccgcagtcacagctgaagcttcttgtccaacgtggtaaggagcaaggctatctgacctatgccgaggtcaatgaccatctgccggaagatatcgtcgattccgatcagatcgaagacatcatccaaatgatcaacgacatgggtattcaggtgatggaagaagcaccggatgccgatgatctgatgcttgccgaaaacaccgcggatgaagatgctgccgaagccgccgcgcaggtgctctccagcgtggaatccgaaatcgggcgcacgaccgacccggtgcgtatgtacatgcgtgaaatgggtaccgtagagctgctgacccgtgaaggcgaaattgacatcgccaaacgcatcgaagacggcatcaatcaggtgcagtgctccgttgccgaatatccggaagcgatcacctacctgcttgagcagtacgaccgcgttgaagcggaagaagcccgtctgtccgatctgatcaccggtttcgtcgatccgaacgccgaagaagatatggcgccaaccgccacccacgttggctccgagctgtctcaggaagagatggatgacgacgaagacgaagacgaagatgaagacgccgacgacaacagcgatgacgacaacagcatcgacccagagctggcccgtgagaaattcgccgagctgcgtacccagtacgagctgacgcgcgacaccatcaaagccaaaggtcgtagccatgccgccgcccaggaagagatcctgaagctgtctgaagtcttcaagcagttccgcctggtgccgaagcagttcgattacctggtcaacagcatgcgcagcatgatggatcgcgttcgtactcaggaacgtatcatcatgaagctgtgcgttgagcagtgcaaaatgccgaagaaaaacttcatcaccctgttcaccggcaacgaaaccagcgaaacctggttcaacgccgcggtggcaatgaacaagccgtggtctgagaagctgctggaagtgaaagaagatgtgcagcgcggcctgcagaagctgcagcagattgaagaagagaccggcctgaccatcgagcaggttaaagatatcaaccgtcgcatgtccatcggcgaagcgaaagcccgtcgtgcgaagaaagagatggttgaagcgaacctgcgtctggttatctctatcgccaagaaatacaccaaccgcggtctgcagttcctcgacctgattcaggaaggcaacatcggtctgatgaaagcggtcgataagttcgaataccgtcgcggctacaagttctcgacctacgccacctggtggatccgtcaggccatcacccgctctatcgcggaccaggcgcgcaccatccgtattccggtgcatatgattgagaccattaacaagctcaaccgtatctcccgtcagatgctgcaggagatgggccgtgaaccgaccccggaagagctggctgagcgtatgctgatgccggaagacaaaatccgtaaagtgctgaagatcgccaaagagcctatctccatggaaacgccgatcggcgacgatgaagattcgcatctgggggatttcatcgaggataccaccctcgagctgccgctggattctgcgaccaccgagagcctgcgcgcggcaacgcatgacgtgctggccggcctcaccgctcgtgaagcgaaagtgctgcgtatgcgtttcggtatcgacatgaacaccgaccacacgctggaagaagtgggtaaacagttcgacgttacccgcgaacgtatccgtcagatcgaagcgaaggcgctgcgtaaactgcgccacccgagccgttctgaagtgctgcgtagcttcctcgacgattaatcgtcgcggggcatcgtctacagcctgttaaaaagctccctacggggagctttttttatggcgttcaggtggccatccggggaaagtcgcctctctccgctactggccgcgggttgccagggcatcgtccagttcacgataggccgccaccagcttatcgagcgtcgcccggtttaagccgctgggattaggcagcacccacacctgggtcgtcccgatggtcatggcctgtttcccccacttcgcgccgcgctggttaaaggccagctcgaaggcctgcttgccgagcaccgccagggcctgcggctgatactcctcaattttccgcaccagctcacggccgccgctgcgcagctcctgcaaggcgacctcgctggcctgcaccgtcggacgctctaccagcatggtgatgccgcagcgcgtatccagcagctgcagctcctcttccggcctgagctgccgatcggtgaacccggcctgatggatgaccttccagaagcgattgccaggatgggcaaaatgaaagccggtatgggcggaggacttccccgggttgataccgcaaaagacaacgcgcaggcccggcgcaaggatatcgctaatcatgttttctccggctgtatggctaaaacatgattataaaggattgaaaatgcattgtttataaaaacagcagctgcgcgctttacgctggattgcaatcgccagttactttataatccctcgccacggccccttagctcagtggttagagcaggcgactcataatcgcttggtcgttggttcaaacccaacaggggccaccaaattttagctttaaaatcatataattaagccactcgaaagagtggcttttttgttcctgaattttaaaatggcaccacaaaccgctgagcagcgcgcatggcttagcgtgttgtcgctatcccattaagaggataaaaagtccgttataacgcagggaaaatttgcgcttacgctaaaacagatagcattctgccttagcaaaatattgctcagagcatctcgggcagcccataaccgccgcactcctgttgacttctgtctaactacgcaacgtagtcttgaaatatctttcattcctgcaatgctggaattcatactactcacgataaatgtaacaacacaggtcaatttccgaaaaataaccatagcctgcgccagctgatcgaaatcaacgcgttcctccccccgctcttatatataacccgctgacttacaaaaaggatgaaatgatgaaaatacgggatatatcaatcagtacctgtctggcactgttattaatgaattgcgtagctaaaccacccatgacgacggaaaatgaaagaggccgccgcgtttgcttttaatgtcgatgcttcgcaggtgtcaatttccgatgcgaggcagcaggatgtgaaaaccaactttgtagtcaccatcggcaaaaccagccatcgctgctatgtgacgaaggccgccgagccgaagctttacaggctgatcccgctgggcggcggtagcaccgtctcggatgccatctgcgccggcgccaacccgacgctagcgagcaaaacctgcgacgccctgtcgcaaaaagcgggccgctgctgagcctttgcgcagaagaaggccgctaactgcgcatttagtcactttttctgccgttttaccgcggtcgcttagttcagcgaccgcacctgctgataagaattgagccgttcccgcagcgaggtgagccagacatccggctcctgacggcagatttcggtgaggatcggcgtcagcaccagctcggcttcatggaagtcggtccactccggcggctccagtgaaaaaggatcgttcatcagccaaatcaccatcggcgtccaggcgcgcggatccagttgcagataatcctgacagcgcatcatatctcgggtccgcgcctcatcggggacgacatcctttcccaccgcggcgctactcattgccagtactgttattcctgccatcagatgtttccaaacccattttcgccagaaggcgcgtttttctttcgccattgttattattttacctgccagttgtcgccggacgatattcccgagaactcaccttaataagagcagattaatcgtttgcattttttttaacagcagaccgcgctgaagcaagtgaacgcccgttcctacagctgtcatccagctatgcaaatatattcgtctggctcagctccacaatattcccctggcccaaaacgatttgtgttacaattacgccttataacggcatcgataaaaataacccccgccgcacctgcaccaggcatcgcccttcttttttcatatcaggatttacgcccccatgaatgcgataatcattgacgatcatccattggcacgtatcgccattcgcaaccttctcgacagcaacggtattaccgtcgcggcagagctcgacagcggcgctcatgccgtgcagaccgcggaaagcatgcagcctgacctgctcatcgtcgacgtcgatattccagagctcagcggtatcgaggtgctggagcagctgcgcaaacgccgctaccagggaacaatcatcatcatttccgctaagaatgaactgttctacggcaaacgcagcgccgactgcggagcaaatggttttgtgagtaaaaaagagggaatgaataatatcctcgccgcaatcgacgcagccaataatggctacagctatttccccttttcactggaacgcttctgcacccacggcatcaccgatcagaaccggctggatacgctgtcaacgcaggagatgaaggtgttccgctatattctcagcggcgtcgactacaccaccatcggcagcaaaatgaatatcagcaataaaacggtaagtacctataaggtccgtctgatggataaattaggctgcagcaccctgcttgagctatatgactttgcgcaacgcaataaaatagggtgatggcatggcggttcgtcttattttatccgtcgttgtcgggctggcgctgagcctctcgcctgccgcgtatgccatgaaacagctggagctgaagagccattctcatatcgcggcgatcgatatcccgcttagcggtaaggagaaagcatggctggcggcgcagccgacgctgaccgtcgggacctggcttcccgagaggacgcccatcgtctatgacggcgacgagaaaagttatcagggcattaacgccgactatctggcgctgatggcgcacagcctcggactgaaggtgattatccgccagtatgacaccgagcagcaggcgctcaccgccctggccgaccgccaggtggataccctgctcactcaggtggcgcaccgggatgcgctcgccccgggcctggatcaatccgcgccgctgcttaaaacctggccgacgctggtcacctcgctgaaatcccctctgccgccgctgaccactgaccgccgcgtcacgctggcctgcacccgcgattgcgcttttttcgatattattcagcaggcgtttcccaacgccaaaatcaccctttatgatagcgactatcaggctctcgcctcggtggtcagcggcgagaatcagtattttatcggcaacaacatcaccactggccactgcatctcgaaatatttctcgcaatcgctggttatcgcgcactattttcgtcagcaggagcaacacaaccgctttgtcacccgtgacgatcggccagagctgcatcaactcttcgaccgttttatccatgccgtcgacagcgacaccgcgatgcggatcatgcaaaactggctcaaccgtggcgatctgtcgtttctcaataccccgcttacctttagccccgaagaacagcgctgggtgcagaagcatcgtcgcgtccgcctgctggtgaacccctattttccgccatttaccctggtggataacgaggatgaactgcgcggcatcatggccgatatgctgaatattgtctcactccagaccggcctgcagtttgaccctattctggtgcgcaaccgtcaggctctggcaaagcgcatggaaaaagaggactgggcgatcatgcccgccgccaccctgaccccacagccgcaggcctacgtcaccctcagcgatccgcttattaacgtggcctttgtgctggtcgcccgcggcagcgcccccgaccagcatctgctgacgcgctcggcacggatcgccctgccggtcgggcctatcgccgcccatgatctgaaagcgcgttttccgctgattaactgggtggaaacggataacgttggcgtcgccatgaagatggtagaggaaggcgaagtggatgccgccgtagcctcggagctttccgcccgctatatgatcgaccactactatccacagggtctgcactacacccgcattgatggactccccgtcgcggccattcggctggccatcccgcgcgatgaaccggtgctggccgccattcttaacaaagcgctgcaggttattccgccacgggatattctgcagatgaccgagaagtggtcgaaaatctccagtcagcaaatagagaactggagccagtacagccgccagttttaccagctgatcgcctttgcgctggtgctgatcgccatcagcctcggctggggactctccctgtgtcgggaagtgcgcaaacgtaaagactcccagcagcggctcgaggaggagctggcgcagaaggaggccctctcctgtgcgctggagcgcgaaaaagacaaagcgattcaggcgacaaaagccaagagccgctttctggccagcatgagccacgagctgcgcacgccggtgagcgccatcgtcggctttctggagctgctggcgaaaccggagctgaacggcggccagcgtaaagaggcgatcgagctggcggggtcgacggcgcaaaccctgctgggacttatcggcaatattcttgatatcgacaagattgaatcgggaaaataccaggttaccccgcagtggagcgatgtcgcacagttagtgtcgcagcagtgtcataccttcgacgcgctggcgcagcaaaagggcatcgatctgcactaccataacgcgctgcaggaagggaccatgctgtgggtcgacccgcaggcgctacggcaaatcctcaataatctcattggcaatgcgctgaagtttaccgtcgaaggcgcaattcaggtctcctgccggctgacgccggcgaatgagacacagggagagttggccctcatggttagcgacagcggctgcgggatcagtgaagcagagcaggccaccctcttccaccgctatgcccaggcgcgccagggacgccagcagaccggctccggactggggctggtcatttgcaaagagctggttgcgctgatgcagggtcgcctggagatggtcagccgtccgggcgtggggaccactttcaccatcacgctgccggtcaaggcgagccgctgcgcgatccacgcgccgcaggcgtcgcccgccagaccgcaggctctacccgggctggcgatactgatagcggacgatcaccccaccaaccggctactgctcaagcgccagctcagcactatcggctatagcgtcgatgaagcctgcgacggtgaagaggcagagaataagctcgccagcaaacattacgatctgctgataacagacctcaatatgccgaagaaagatggcctggcgctggcggcctcgctacgccgtcgctatccgggcctggtaatttggggcgtgactgccagcgcgctgccgcagtcgcgggaggcgtgtctggccagcggcatgaatatgtgtctgtttaagccggtgtcggtccagacgctgagtcatgagctcagccgtttagcggtgggccgcgcatcacctcacgctacccggcacctgaagctcagcgtgctgagcgagaatacggggggagaccaggcgctgatgaatgagatgctggagacgttccgcgatgcgtcggccgcggatttacaggctgccggacaggcaatcgcccggcatgagccgcagatttttctgcgggcgctgcaccgtctgcacggttcagcacaaattctggggattactgcgctacaacaactgtgcgccccttttgaggcaaagcggcctgattcgctgacgccggcaagctgtctggaggtggtacagcgcatcaccggcgtcatgcgcgagatcgatggcgaaatcgacgccctgatcggccgctagccgttccgctcgggcagtccgcctgcccgagcgttaaggggacatccttgtcagttttttcctctgcgctctctcagggtggaacaagtatcagttgcctgccaccagcatctcgctatccaccacaatgccctcttcagcgcccttcagcaccagattcgcttcgtaatatttaccggctttcagcagttcttgcgcctgcgctaccgccttacgggtctggttaagcggcatcagatactggttctcaatcacgccaataccggccagacgcagggtatcgatagcccctttctgatcgcctttcgccagcttttcgttggcggattggatagcgctctctttttccggcgtggccacatagtcttcagacagggcgatagaggcgttaatgatcacatagcgatcggcgatcattttggctttagcatcagttttcacaaacttcgcccagctggcatcatcggcggccagcagcgcggcggcgtcgtctgtcagttttttggcgctatccggctggccatggaacagcgccagacgggcgaactggatgtcgcgcatcgcattcgcgccctgcaccgccacctgcagcacatcggcggcttctttctgtacctgcgtcgtggctgccgcggctggcgcggctggcgctgccgtcgcgctatctgttgcccataccggagaggtactcatcatggttgccagcaggctcgccagaatgacttttttcatcgttgactcctgattaaaatcggtaagcatcaccaaacgcagccagcttaaaaaatatcgcgggcattgagaatcagagcccggaagtaatattgcgggcctggtctgacagctgtcagaccaggcgtataaagtggcctcggcgctcttatttacgcctgccgatcgcgcggcctactattttcctcagacctttcttttggcccgctgaataaaccctcacgctttttattcagcgtcaggccgccaaccgggatctgcggagcaattatgtttatgtttagccattacaccttaaatgcgtttagcccacgcgtcttcattcgatataaacggcatgcctgcctgatggcggtattgctgtttatctgcggagcctgttgtctggcctggccgttggtcgccggctggtatctcgccacagtaaccggcatgttattgatgatctgcggcttctattcgctgtacagcctgattgtcttccgccagcagcactggaaatcacgcctggtggcgctgatcttcgccatcgcctggatcgtgctcggcctgagctttgtcgtcaatcctctcaacggtatgagcagtctggccattttatttggctttttatttgttctcggcggtatttcccgcatcgttaacggatgtcaaacccgcaaacaaagcggcgctggctggaatatttttatcggcctgttggatttacttatcgcctgcctgtggctggccatgaacccgcagcaaagctggttatttattaccgcctttatcggcgttgaaatgatatttagcgccatcggcttgttggtcctgcgcaataaaatgaagcacgctcaggcttaagccctattttgtcactggagaagaaaatgaatttacctaaagcactcgtattgaccgtggcggctaccacattctgtctgatgaccagcccggcgttcgcggttgaggaaaccacgccgcagaatatgacctgtcaggaatttatggatatgaacccaaaaagcatgaccccggtggccttctgggtagtgaatcgcaacaccgactttagcggcggcgactatgttgactggcatgaagtcgagaccgtttcggtaccgaaaatgctgcaggagtgccacaagaaccccgccgctaaacttggcgatctcagcgcggtcatcaaaaaataacccccccggcatcaggccggggaaacccgccgcgctgcggcgggtcccgctttactcatcgataccgcattcgcacggcagatggcggccgataagcttgcgatacaaaaacgccccgataatcgcccccaccaccggcgccagcagcggcaccagaaagtaagggatcgccagcccaccggtaaaggcgatcgagccccacccggccagactggtaaacagttttggaccgaagtcgcgcgccggattcagcgcaaagccggttagcggccccatcgacgcgccgatcacggcgatcagcaagccaatcagcaacggcgccagcggcccgcgcggaattccgttgccgtcgtcggtcagggccatgatcatcgccatcaggattgccgtgatggtggtctccacggcaaacgcttgtataaaagtgatatgtggatgcgggtacgtggaaaagaccccggccaggttaagactggcggcagtgccgcgcacgatatgctgactctgttcaagatcgagaaacagctggcgatagagcccatacaccagcgcggcggcgcagaaggccccggccgtctgggcaacaataaacggcagcaccttgcggcgttcaaaacaggcgaacagccacagggcaatggtcaccgccggatttaggtgcgcgccggagacaccggccgtcaggtagatggccatggcgacgccaaggccccagataatactgatctcccactgaccaaagctggccccggcgacccgcagcgcagcgacgcagcccgcgccgaagaaaatgagcaatccggtgccaagaaactcggccacgcactgcccggttaaggtagaagtctggttcattatcggcatcctgaaatagcacgttaaagagagaggctggcgcgagcgcccgtttaattcgcctgaccggccagtagcagcccggtggcgaccgcattgcgcggcccttctgttccccgaatattgccctgcccggcgaccacgccatagtgcgacaaggcttccgtgataagctgcgggatctcaaagtccagcgatgagccgcccaccagcaccacaaaggcgatatcgcgaatggaaccgccgggtgagacctggcgcagcgcgcgcaggcagttggtgacaaacactttctctttcgcctgccggcgcacgagacgaattttttccagcgggctggcgttatcgatcggcaccagttcgccctccttgatgtacaccactttggcgaacaccgccgggctgagggcttcccgaaagaactccaccgcgccattctcgtgacgaatactgaacaggctttccactttggccagcgggtacttttttatcgcttccgccagcgaaagatcctcgagacccagctcggttttaatcaacaggctgaccatattccccgccccggcgagatggaccgccgttatctgcccctccgcgttgacgatcgccgcatccgtcgagccggcgccgagatcgaggatcgccagcggcgccgcacagccgggagtggttaacgccccggcgatggccatgttggcctccacgccgcccaccaccacctcggtctgcagtcgggcgctcagttcgcgggcgataacctgcatttgcagacggtccgctttcaccatcgccgccatcccgacggcattctccatggcgcactcgccggccatcccgccctgcaccttgcgcggaataaacgtatccaccgccagcagatcctggatgtatatcgcgctcatctcatggccggtcagggacgccattaccttgcgcacccgctcaagcatgccgccggcgtgagtgcccggttcgccgcggatgtcgcgtaccggagcgcaggcgctcatcgcctgcatgatggcttccgcgccctcggcgacatcggcctctccgcggcgcttttcgccgctaatgtagaggttgcccgccgggatcacccgcgactgcacgtccccctgcggggtcttgagcaccaccgctgaacggttgccaatcagggcgcgggcgatggggacgatggcctgggtctcttccgggcttagcccgaagaaggtggcgatcccgtagggattcgacaggatccgcaccacctggcccggcgcggccacttccaccgccgccatcaccccctcggggacctgctccagcagcgtcacttcatctaccaccggcagggttttacgcaggcggttgttcaccagcacgccgtcgtcctttttgaggatcgccgccaccacgttgatcccccggtcgagcgcctcattgagccaccacacggcgtcaaggaaatcgacggcgtcgtcaatcagtacgatccacccctcggcatattgcgccgccggcagcgtcgccagccgcccgagggcgatagtcgtccccacgccaacgcccaccccgcccggcgtctgcgggttatgaccgatcatggtcgattcggtgataatggtctcggtgatggtctccatcgccacatcgccaatcaccggcgcggcttcgttaagatagatgcgagagacatcgctcatcgaccacggtgttttcgccagggcctgctccagcgcggcgagggtcccggcgatattgtcccgcgtccctttcatgcccgtcgtcgcgacgatcccgctggcaacaaacgccctcgcctgcgggtcgtcggacgccagcgccacctcggtggtggcgttgccgatatcaatcccggctattaacggcatgctgacctccgcttagtttcctttacgcagcttatgccgctgctgatacacttccgccgactcccggacaaaggcggcattcactgtcgcatgccaggtgtgctccagctcgtcggcgatcgccagcagctccgcctgcgaggagcggaacgggcgcagcgcgttatagatagccagaatgcgctcgtcaggaatggcgataagctccgccgcgcggcggaaattgcgcgccaccgcatggcgctgcatctgctcggcaatctgcgcctggtactcaagggtctgacgggagatccgcacatcctgcgggcccacctcgccagagagcaccttctcgagggtaatatcggtcaatggtttgccggtaggcgtcaggatatgctccgggcagcgggtggctaacggataatcctgcacgcgcatggttttctcgctcatggtcactcccttactaagtcgacgtgcagggtgacgggctcggcgtcctgcaccacatgtttggtctctttgatatgaaatagcgcggctttggccataaatttcggccgcaccatctgatcgttcaccaccggcaccggcgaaggtgactctttgcgcgcatagcgcgcggcgtttttgccaatctgccggtaggtctccagcgtcagcagcggcgcctgggagaacagctccaggttgctgagcggcagcagatcgcgctgatggatgaccgtggtccccttcgactggataccgatgccgatccccgagccgctcaggttggccgcatcccaggccataaaggagacgtcggacgtgcgcagaatgcgcaccacccgggcgtgaagcccctcttcttccaccccggcaatcagctctttgaggatcgcgccatggggcatatcgatcagagtgtgatgctggtgtttatcgaaggcagggccgacgccgatcaccacttcatcggcgcgttcatcggcagaagctaccccgccctcgcgggttttcagggtaaaagagggctgaatttgggttgtctgttgcacaggaataccgccttattcaatggtgtcgggctgaaccacgcccggaatatttttgatctccgcccagcgttcggcagagatgcgatagccggtgcccggcccctgatagtcattgatgtcgttgaccgcactcaccacctcgaactgccgatcgagaatggccgaggtctgcaggtaatcgccggtgacccgctggcgcagcatattgagaatattgctggcgatatcctcaaagccgctgcggctcagcgcgccgacaatatcgaggccggtgatgttgcgcttcatcatctcttccaccgcactcagatcctccaccacgttacgcggcggcatctcgttgctgccgtgcgcgtaggtggcggcctccacctcctcgtcggcgattggcggcagccccagctcgcggaaaaccgcctggatcgcccgcgccgctttctggcgaatggcaatggtttccgcctcggtcaccggacgcaggccgccgtcaaccatcaggtcacgctgcaggatgttgtaatcatcaaaatcttccgcatcgaagttcgagccggcgaacatgttgtcgtagttcggcaccgcgctgtagccggagaaaataaagtcggtgcccggcagcatctgcatcagggtgcgcgcggtgcggcgaatatccgagtgggagaaagtctggtcgttggcggacgccacttcgaggtcgagcatagaggcgatcaggttttccgccagcaccgcccgaatgcccgacggcacagcgccggtcatgccgatacagctcaccgcgccgttttgcagcccctgaaccccggcgcctttggtaatgaagatgcagcgcgattcgaggtagagcatcgacttgctctccgaatagcccatcagcgcttcggatccggtgccggaggtgtagcgcattttcaacccgcgggaggcgtaggccgaagcgaggaacgcctttgaccacggagtatcatcgccgtcggtaaataccgcttccgtgccgtagaccgacaccgtctcggcgtagctggttaagccacgcatgcccagctccagctcggtggcctcttccaccgagcactgcgtcaacacgccgggacggccgcactgcgaaccgaccaacagcgccagggcgttaaacggcgcatagcgcgcgataccgaccgtggtctcctgttctgagaagccgcggatcccggcctcggcggcgtcagcggcaatctgcaccggattatctttgagattggtgacgtggcactggttggagggggtccggcgggcacgcatcttctgcagcgccatcatcatctccaccacgttcatctgcgccatcacctcgaccgctttggccggcgtgatggcggtagtgatggcaatgatctcctcccggctgacgtgaatatccaccagcatgcgggctatttccaccgcctccaggcgcattgcctgctctgtgcgctcaacgttgatcgcgtaatcggcgataaaccggtcgatcatgtcaaactggtcccggcgtttgccgtccagttcgacgatcagaccgttgtccacttttactgaagagaccgggtcaaaggggctgtccatggcgatcagcccctcttcaggccactcgccaatcagcccgtcctgattgacggggcgctgggccagtactgcaaatcgttttgatcttttcattgttcatcggctcaaaaggtgaaatccgcagacggtagcgaatacgccgggccagcgtcgttgccgcccggccattaccggcaatagcggaactttaaatgagccagtggtgaaaaaaataaatttaatttcgtttcaatttggcacacgaaatctaccgacagtttcactatgaaactttactccgccggcaaaaataaaaaatgtgatcgcccgcaatgatataaatcaattaataaaaaacgcccttaattacgttttgccgacgctattttaaccctattgactaaatcatggcgggcgacaaaataacgctgacaaaaataaagcaagccaaccgaatggtaatagttttttactatcgccccctactgactattcgcgccagcgttatcctggtgcgggagagaatgatgaacaagagccaacaagttcagacaatcaccctggctgccgcccagcaaatggcggcggcggtggaaaaaaaagccgctgagatcaacgtggcggtggtgttttccgtggttgaccacggaggcaacacgctgcttattcagcggatggacgaggccttcgtctccagctgcgatatttccctgaataaagcctggagcgcctgcagcctgaagcaaggtacccatgaaattacttcagcggtccagccaggacaatctctgtacggtctgcagctaaccaaccaacagcgaattattatttttggcggcggcctgccagttatttttaatgagcaggtaattggcgccgtcggcgttagcggcggtacggtcgagcaggatcaattattagcccagtgcgccctggattgtttttccgcattataacctgaagcgagaaggtatattatgagctatcgtatgtttgattatctggtgccaaacgttaacttttttggccccaacgccatttccgtagtcggcgaacgctgccagctgctgggggggaaaaaagccctgctggtcaccgacaaaggcctgcgggcaattaaagatggcgcggtggacaaaaccctgcattatctgcgggaggccgggatcgaggtggcgatctttgacggcgtcgagccgaacccgaaagacaccaacgtgcgcgacggcctcgccgtgtttcgccgcgaacagtgcgacatcatcgtcaccgtgggcggcggcagcccgcacgattgcggcaaaggcatcggcatcgccgccacccatgagggcgatctgtaccagtatgccggaatcgagaccctgaccaacccgctgccgcctatcgtcgcggtcaacaccaccgccggcaccgccagcgaggtcacccgccactgcgtcctgaccaacaccgaaaccaaagtgaagtttgtgatcgtcagctggcgcaacctgccgtcggtctctatcaacgatccgctgctgatgatcggtaaaccggccgccctgaccgcggcgaccgggatggatgccctgacccacgccgtagaggcctatatctccaaagacgctaacccggtgacggacgccgccgccatgcaggcgatccgcctcatcgcccgcaacctgcgccaggccgtggccctcggcagcaatctgcaggcgcgggaaaacatggcctatgcttctctgctggccgggatggctttcaataacgccaacctcggctacgtgcacgccatggcgcaccagctgggcggcctgtacgacatgccgcacggcgtggccaacgctgtcctgctgccgcatgtggcccgctacaacctgatcgccaacccggagaaattcgccgatattgctgaactgatgggcgaaaatatcaccggactgtccactctcgacgcggcggaaaaagccatcgccgctatcacgcgtctgtcgatggatatcggtattccgcagcatctgcgcgatctgggggtaaaagaggccgacttcccctacatggcggagatggctctgaaagacggcaatgcgttctcgaacccgcgtaaaggcaacgagcaggagattgccgcgattttccgccaggcattctgagtgttaacgagggggccgtcatgtcgctttcaccgccaggcgtacgcctgttttacgatccgcgcgggcaccatgccggcgccatcaatgagctgtgctgggggctggaggagcagggggtcccctgccagaccataacctatgacggaggcggtgacgccgctgcgctgggcgccctggcggccagaagctcgcccctgcgggtgggtatcgggctcagcgcgtccggcgagatagccctcactcatgcccagctgccggcggacgcgccgctggctaccggacacgtcaccgatagcgacgatcatctgcgtacgctcggcgccaacgccgggcagctggttaaagtcctgccgttaagtgagagaaactgaatgtatcgtatctatacccgcaccggggataaaggcaccaccgccctgtacggcggcagccgcatcgagaaagaccatattcgcgtcgaggcctacggcaccgtcgatgaactgatatcccagctgggcgtctgctacgccacgacccgcgacgccgggctgcgggaaagcctgcaccatattcagcagacgctgttcgtgctgggggctgaactggccagcgatgcgcggggcctgacccgcctgagccagacgatcggcgaagaggagatcaccgccctggagcggcttatcgaccgcaatatggccgagagcggcccgttaaaacagttcgtgatcccggggaggaatctcgcctctgcccagctgcacgtggcgcgcacccagtcccgtcggctcgaacgcctgctgacggccatggaccgcgcgcatccgctgcgcgacgcgctcaaacgctacagcaatcgcctgtcggatgccctgttctccatggcgcgaatcgaagagactaggcctgatgcttgcgcttgaactggctggcgtcaatatcgtactgcttcattttgcgccacagggtggtgcggccgatattgagcagctgcgacatctcctgcacccgcccgctggtcacccgggcggcgtgaataatagcttccttttcgatggcgctaaaggtcaggctggccggcagcagcgatgacgcgctatccccgcccggccgctcggaaaagagatattccggcagattactcaggcgaatgtggccgttgtcgctgctgatggcgatattctcaatgacgctattgagctcaaaatcattccccggccacgagtaggccaccagctgcgccagcgcgtcatcgtccactttcagtcgcgaagagaaacgcttctccaggctcttcaaccggttatgcaccagcgacggaatactgttgcgtcgggcgcgcagcggcgggatgacgatctcaaaggagtgcagcgcatagtacagctggcggctaaagcggttctgttccaccagattggccagatcgacggtggtggtggcaatcaccttcacatccaccgggatcaggcgccgggcgtcgaggcgggtgagcacgccctgcttaattacctgcagcagggccgactgcagctccggcgccagatactcgatcttttccagaaacagggtgccgccgttggccagctcaaggcggctcaggcgaccattttcatcgtcggtaggggcgctgcccataaagtcctggccaagcacgctgtcggcatatagctggcagttgacggcgatgtaggggccgcccgcccgttcgctttcattgtgaatagcctggctcagcagctctttcccgaccccctcttcgccgcacagtagcaccgggaagccgccgcgcgccgcctggcggccaaagtggatcaggcgtcgggtttccggatcgtcggcagacatctgctcaaaggtgtggctaactttaccgagctggctggtcatcagctgccgcatctgctccaccgggtgcagcagcagaataaaactgttgccttgcgcctcgacaatcggttttaaggtgatcaccgcgtcgacaaactgatgctgactttcaaaggtgacttcgacgtgattcaggccgcgggcgtgtttgatggcgcggcgcagcagcgccgggagggtcaccagatcggcgatatttttcccctggctggcctgagcatcaagatgcagcagtctcgccgcctgaacattgagaaactgcagcacgccctgttcgttccacgccatcaccccatcgtccatgctctccagcaggccgtacatctgattgaggtggcggttggattccgccagcaggctgtcggtaagcagggagttacccacctcgcgggcgatggccagcgtcagggagaggtcggcgctggactggtgctcgaccagacagcaaagcgagatagagccgaacagccgcccgtggttatcaaacaccggcgtcgagcaaaaactccatggctgtagcgcctgcttaaaatgccgatcgccggcggtgttgatcggctggccctgcatcgcggccagcgacagcgcgcaggtgccgataatgctctccgcacaatagctgccgtcgcgaaatcccagggcagccagctgggccagggtttgcggctcgccgcaacggctcaggatgcaggcggactcatcaagaataaacagcgcgcaggggcgaccgtccataaactcccaggcgtcttccagcgccgcctggccgatggtcagcagcgcggttttacgccgacagatggagtcgaaggtcaggccctgggcctggtgcggcgtttgccaggtttcgcgctgcataaacttgctgcagcggtgccatgactgggcaatgacggaagagaccgccttcccggtatcctgagtctgaacagtcatatccttttccgcgttgtaccatagagaacccctccggcagcgactgccggaggggagaaagaaaaaccgctgacctgggccagcggtttagccaccgcgaattaacgcgccagccactgctggcctaacagatcggcggtgaggatagcggcatggacgctctccggggtcaccgcaaacggcatattatggatggtttccccttccgcgcaggtagctttcgccaccgcggcgattttctcgtcgatcccctctttgacgcccatctgcgcgagcgtcaccggcaggccgacgcgctggcagaagcccagcaccgtttcaatctcgtccatcgggctgttctgcagcaccagctgcgccagggtaccgaaggccactttctcaccgtgatacaggtgatggcactcttcaagaatggtgaaaccgttgtggattgcatgggcagcggccaggccactgctttcaaagccaatgccgctgaggtaagtgttcgcctcgatgatgcgctccagcgcttcggtcactaccccggcctgcgccgccagacgggccttttcgccctccgccagcagcgtatcatagcacaggcgggcgaggctcagcgccgcctcggtggactgtcctccggccatgctggtggcgcgcgcatcgtagcaagctttggcctcgaaccaggtggagagcgcatcgcccatgccggagaccagcaggcgtaccggcgctttggcgataatcgccgtgtccatcaccaccatatccgggtttttcggatagatcagatactcttcaaactcgcccgcttcggtgtagatcaccgacagcgcgctggtcggcgcatcggtcgaggcgatggtcgggatcaccaccaccggcagcttctggtagtaaccgatcgccttcgcggtatcgagggttttaccaccgccgatcccgaccacgccgcggcagccctgtttttgcaaaatcgccatcagacggttgatttccgcatggctgcattcaccgttaaaccgttccgcatggcagcgaatatcgtggctctgcaggccattcaccactttctctcccgccagcttcattacgaaatcgtcggcgatgacgaagaagctctccgccaggtttttggcatattgaccgaacagaacagcagcatcaggaccctgaagatatttggctggagattgaataacttttagcattcctttcaccctcaaataagtgcgcatgtagacatgatgagccctggcgttatccgcgccggccagtgaagcgcggcctgaacggagcgtaccggagcagtgcgatcactgtagggccggcagggaacaaaaaaatctttcgcctttttgttctgatatgaaacacaggttaattttttacgttccatattggaacaaaaaaccctagtctctgtcaggattgcgatcccgatccgctcctttgccgcataatgcccttgcaatcctccgtgtttgaccgccttttctcccgcagtcggcagaaaatcagcaaaaaattttttcccacccgcttcgccagctatcctgaccgccgcttatggcagaagaaaaaaagcgcgccagctcgcattttcaccatatcctcggcaaaaacgttccataaagaaacaaaatcaggaagcaatgtttcgtaatgaaacccgatcgtcggggcattctttttttcgtccgctcagccagaatcatcatatcgccaggcacgctccaccgtcagacgatacccctacgcgatgactgcctccgccagcagagaggcggcatcgaaccttctccaacggagcactgaataatgaaaaagctgattaaccgtgttgaagatgtactgaatgaacaattacaggggctggctaaagcccatccgcagctgaccctgcatcaggacccgctgtatgtgacccgcaccgacgcgccggtggctggcaaggtggccctgctctccggcggcggcagcggacatgaaccgatgcactgcggctatatcggccagggcatgctctccggcgcctgtccgggagaaatcttcacctcgccgacgccggacaaaatgtttgaatgcgcgatgcaaattgacggcggcgaaggcgtcttgctaattatcaaaaactataccggcgacatcctgaattttgagaccgccaccgagctgctgcatgagagcggcattaaagtcaccaccgtggtggtcgacgacgacgtggcggtgaaagacagcctctataccgccggtcgtcgcggcgtcgccaacaccgtactgatcgaaaaactggtcggcgccgccgccgagcgcggcgactcgctggaagcctgcgctgaactgggccgccgcctgaacaatctcggccactcgattggtatcgccctcggcgcctgcaccgtaccggctgccgggcagccctcctttacgctgaaagatgacgagatggagttcggcgtcggcattcacggcgagccgggcatcgaccgccgccgcttcagctcgctggaccaaaccgtcgatgagatgttcgataccctgctggaaaacggcgcttacagccgcacgctgcgccagtgggataccgtcaagggcgcgtggcaggaagtgcagcagagcaaaaccgcgctgcaaaacggcgaccgggttatcgcgctggttaataacctcggcgccactccgctttccgaactgtatggcgtgtataaccgccttgcccagcgctgcgaagcgtccggcatcatcatcgaacgcaacctcatcggcagctactgtacttcgctggatatggcgggcttctccatcactctgctgaaagtggatgacgagacgctgacgctatgggacgccccggttcacaccccggcgctgaactggggaaactaaggagcacgacatgtcactgaacagaacgcaaatcgtcgactggctgtaccgctgcggcgatattttcaccaaagagagcgattttctcaccggcctcgataaagagattggcgacgccgaccacggtctcaatatgcaccgcggtttcagtaaagtggtcgaaaagctgccgtcgattgccgataaagatattggctttatcctcaaaaacaccggcatgacgctgctctccaacgtcggcggcgccagcggcccgctgttcggcaccttcttcattcgcgccgcgcaggtgacccaggcccaccagagcctgacgctcgacgagctgtacctgatgatccgcgaaggtgcggacggtgtcgtcaatcgcggcaaagcggagccaggggataaaaccatgtgcgacgtctggctgccggtggtggactccctgcgccagtccagcgagcagcacctgtcgatcgccgccgcgatggatgccgcctgcgaagtggccgagcgtgcggcccacgccaccatcactatgcaggcgcgtaaaggccgcgccagctatctcggcgagcgcagcatcggacatcaggatcccggcgcgacctcggtgctgtttatggttcagatgctggccgccgccgccaaagagtaaggaaatcgcgatggtaaacctggttattgtttctcatagcgcccggctgggcgaaggtgtcggagaactggcccggcagatgttaatcaacgatggctgcaaactggcgatcgccgccgggatcgacgatcccgacagcccgatcggcaccgatccgcttaaagtcatggaggcgatcgaatccgtggccgataccgatcacgtgctggtgatgatggatatcggcagcgcgttgctcagcgccgaaaccgccctcgatctgctcgatccggcgattgccgcgaaggtgcgactgtgcgccgcgccgctggtggaagggacgctggcggccaccgtcagcgctgcctccggcgccgggatcgacaaggtgatcgccgacgccatgagcgccctggaggccaagcgggttcagctgggtttaccttcgccaacttctgacgccgcgccggagccgatgcttgccgacgacggcgacacaaaatcggtgtcagtcattattaacaatcacaacggcctgcacgtgcgtccggcgtcgaagctggtcgccgcgctggcgggctttaacgccgatctgctgctggagaaaaacgggaagtgcgtcaaaccggacagcctcaaccaaatcgcgctattgcaggtccgccgcaacgataagctgcgcctgctggcccgcggtccggatgccgacgcggcgctggcggcgtttcaggcgctggccgccgataacttcggtgaatcgcctgcggcgcaaccggcagcggctccggcaacgcccgagcgcgtcgaaggcgctgccctgcgctatccgctggccctgatccagccgctccgcccggctgccgccgatgccgcccgcgagcagcagcgcctgcgccaggccattgaccagacgctggcggatcttatcgccctgaccgagctggcggaaaataaatttcacgccgatatcgcggcgatcttcgccgggcaccacaccctgctcgacgatgacgatctgtttgatgccgccaacgatcgcctgctcaccgaacaatgcacggcggaatgggcatggcatcaggtgttgatggagctcagccagcagtatcgccagctggatgacccctacctgcaggcgcgctatatcgatatcgaagatattttgcagcgcaccctgcgccatctgcagggcgttcaggagagagtgccgacgcccggcgagccaacaattattattgccgacaacatttatccctcaaccgtcttacagctggatgccagcttcgttaaaggcctgtgcctgcgcgatggcagcgaacaggctcacggcgcgattatcgcccgcgcggcggggatcgcctggctgagccagcagggcgaggcgctgaacagcgtgcagcccggcgagactatcgtgctcgatatgcgccaccagcgccttatccgtgactaaaattcacgttgaccgttaccgctccgggggcctgcctccggagggtgagttttcgcttactcttcaggaaccactatgtctcaattcttttttaaccagcgcgccagcctcgtcaacgatgtgattgagggtaccattatcgccagcccgtggaataacctcgcccgtctggagagcgacccggcgatccgggtggtggtccgtcgcgatctgaataaaaacaacgtggcggtgatctccggcggcggcgccggccatgaaccggcgcacgtcggctttattggtaaaggcatgctgaccgccgcggtctgcggcgatctgttcgcctcgccgagcgtcgacgcggtgctcaccgccattcaggcagtgaccggcgaggcgggctgcctgctgatcgtcaaaaactacaccggcgatcggcttaacttcggtctggcggcggagaaagcgcgccgactcggctacaacgtggagatgctgatcgtcggcgacgatatttcgctgccggataacaaacagccgcgcggcatcgccgggaccattctggtgcataaagtggcgggctatttcgccgagcgcggcttcaacctcgccaccgtcctgcgtgaagcgcaatacgccgccagccataccgccagcatcggggtggcgctggccagctgccacctgccgcaggaagccgacagcgcgccgcgccatcaggccggtcacgccgagctgggaatgggcatccacggtgagccgggcgcctcgacgatcgccacgcaaaacagtgcagaaatcgttaacctgatggtggaaaaactgaccgccgccctaccggaaaccggccgcctggcggtgatgctcaataacctcggcggcgtgtcggtggctgagatggcgattctgacccgcgagctggccaacaccccgctgcaggcgcgcattgactggttaataggcccggcctcgctggtgacggcgctggatatgaaaggcttctcgctgaccaccatcgtgctggaggagagtattgagaaagcgctgctttcggatgtggaaaccgccagctggcagaagccggtgcagccgcggactatcaacgtcgtgccgtccaccctcgacagcgcccgggtggattttacgccctcggccaacccacaggtgggcgattacgtggcgcaggtgaccggcgccctcatcgatcttgaagaacatctcaacgcgctggatgccaaagtaggcgacggcgataccggctccaccttcgccgccggggcgcgcgaaattgccgagcggctcgagcgtcagcagctgcccctgaacgatctgccaacgctcttcgcgctgatcggcgaacgcctgacggtggtgatgggcggctccagcggggtattgatgtctatcttcttcaccgctgccgggcagaagctggggcaaggcgccagcgtggccgaggcgctgaacgccggtctggaacagatgaagttttacggcggcgccgatgagggagaccggacgatgatcgacgctctgcagccggccctggcggcgctgctggccgaaccggagaatctgcaggccgctttcgccgcggcgcaggccggggcggatcgcacctgccagtcaagcaaagccggcgccggacgcgcgtcctatctcaacagcgatagcctgctcggcaacatggaccccggcgcccacgcggtggcgatggtgtttaaggcgctggcggaacgctaagccttccccggtggcgctgcgcttaccggggcgatgtaacaccgccgaatagcaggtcgggtaaggcgtaagccgccacccgacaaaaaacggcaccgccggtagcccggataaggcgcgacgcgccgctatccgggttttaccacgatggctttttacttgctgtgccagtacgcctgggaacgcaccagctgctgatcgatgctctcgtcttcaaagcgcgccagcagcgatttcaccaccgcgccttcgccggtcagccagataaaataatcctccgccggcaccttcacctgcgccagacgctcggcgacgaaggccggattgtggcccaccacccactcgatgttaaagccgtcgagatccgccagataatctttatacgacgcatcggcgatagtaacgatggccgtcacctgcggcctcgccggcagctggcgtaatcccagcagacgacggcgcagcgccggcatgccggactcatcgcaaacatacagctgccaggcataatcttccggcaccaccagcgagccgcgcgggccgccgatcaccagcttatcgcccacttttgcttccagcgcccaacggctggcgataccgccatcgtggatatagaaatcgtaagccagctcgtgacgttcggcatcgtacagcggcgtatagtcgcgggtggcaggccgcacgccttccccccagtcaatcccctcctcggtcacctgcggcggggtaaatgccgcgcccggctcggggaaaaaaagcttggtatggtcgtcaaagccgtgagaggcgaagccttccagcgcctcgcctcccagcacgatacgctggaacgccgcgcctgcgcgctccacgcgcagcaccgtcagctcacggaaacgcagctcattgcggacacgctgcgggtacttgtctgctttggtttttgtcatcatcgattgccttcgtgaacggtaaatagatatatctaaacttgatgcaaatgataatgattgccaactaaaaagaatgcaagtctttttttgatatagtcaaaacaaaccgcatcaaaatccacatccagaaaacaatcacatatatatcaacaccttaaaaaataaatagcaaccagcattgcgaacattcattttttagatataaattagatatatcaaaaacagcaggaggtaaccatgcgacatcatcatgaagaagggcgtgggccacgcgggcgccacggtgatcccagcgaacacggcgaccatggccgccgcggcggcggacgtcgccagcgtttctttggccacggcgaactgcggctgatcattctggatatcctcagccgcagcgccagccatggctatgagctgatcaaagagatcgaaacgcttacccaggggaactacagccccagcccgggggtgatctatccgacgctggatctgctccaggaccagggccttatcagcgtggaagacgacaacggacgcaagaaaatccttatcagcgaggaaggaaaacagctgcacgccgagaaccaggagcacctggcccatatccaggagcgcctgcaggcgcggatggtcggctgcgagctgcgccgggatccgcagatgaagcgcgcgctggaaaacttcaaagcggtcctcgacctgaaagtgaaccagcaggccagcagtgccgcccagctcaagcagatcatcggcattattgaccgggcggcgatggagatctctcagctcgactaagcctcttttttcaccaccggctgccccgcgctggggcagcccgcaccacggcggatcgccccgtctattgccgccaggcagaaaatctcgtcagctcaggaataaaacgtgccaatagtggcgcaatgagattaaattttacacaattcgtcttttgctttgcatttatcccgattttcaccgcttctgccgaactggcgtaatccctgcaatacttaatccagtatcgtgtgatacgtccgccccaggagcacattttgaacaggttaccttccagcgcatcggctctggcctgcagcgcacacgcactgaatctcattgaaaagcgcacgcttgatcatgaggaaatgaaagcacttaaccaggaggtcagggaatactttaaagagcatgtgaatccggggtttttagagtatcgaaaatcggtcacagccggcggggattacggagccgtagagtggcaagcgggagggttaaatacgcttgtcgacacccagggacaggagtttatcgactgccttggtgggtttggcatcttcaatgtagggcaccgtaatccagttgtggtatccgccgtcgagaatcaactcgcgaaacaaccgcttcacagtcaggagctgctggacccgctacgcgcgatgctggcgaaaacgctggcagccttaacgcccgggaaactaaagtacagtttcttctgcaacagcggtaccgaatcggtagaggcggccatcaagctggcgaaagcctatcagtcgccgcgcggtaaatttaccttcatcgccaccagcggcgccttccacggtaaatcgctgggcgcgctgtcggccaccgccaagtcgaccttccgcaaaccctttatgccgctgctgccgggcttccgccacgtgccgttcggcgatatcaacgccatgcgcaccatgctgagcgagtgcaagaaaaccggcgacgacgtcgcggcggtgatccttgagccgattcagggcgaagggggcgtgatcctcccgccaacggggtatttgccggcggtgcgtaaactgtgcgacgagtttggcgcattgctgatcctcgacgaagtgcagaccggcatgggccgcaccggcaagatgttcgcctgcgagcatgagaacgtccagccggacattctgtgtctggcgaaagcgctcggcggcggtgtgatgccgatcggcgcgacggtggcgacggaagaggtcttctcggtgctcttcgataacccgttcctgcacaccaccaccttcggcggcaacccgttggcctgtgcggcggcgctggcgacgatcaacgtgctgctgacgcaaaacctgccggcgcaggcggcgcagaaaggcgatatgctgctggacggtttccgcctgctggcgcaggagtatccggacctggtgaatgaagtgcgcgggaaaggcatgctgatggctatcgagtttgttgataacgagattggctacgactttgccagcgagatgttcagacagcgggtgctggtcgccgggacgttaaacaacgccaagacgatccgcattgaaccgccgctgaccctcacccttgagcagtgcgaacaggtgctgaaggcggcgcgcaaggcgctggcggccctgcgcgtttcggtcgaagaagcgtaataaagtgtccttcaccctctccctctgagagggtgaaggataaccctcacacctgcggtaacaggccgataaagctgcgcttctgccgcggctgcgacatcatctcctccagcttttcgacgcaggctaaatagtgcggcgtcttcttatgcgccagcaccgcctcatcgtctttataggcttcgtagataaaaaagcgggttttcacctcgggatcctgcaggacatcaaagcgcaggttgcctggctcctgcagcgcgccctcgtggttggcgcgaaacacctcgagaaactcatccacccgctcgggtttaatattgatctccactagcgtgacgttcatttcagctctccctgtttttcttcctgccagaactgatacgcttcgcgcgcgttcagattctcatgcaccacctttttcaccgccttaagcatcgcgcgcggggcgctggactggaagatgttgcgccccatatccaccccggacgcgccctggtcgatcgcccgccagcacatctccagcgcctcatgctccggcagttttttaccgccggcgataacgatcggcaccggacagctggcggtcactttttcaaagccttcctcaacgaaataggtcttcacaaactgcgcccccatttcggcggcaatccggctggccagcgagaagtagcgcgcgtcgcgggtcatctctttgccgacgccggtaaccgccaggaccggcataccgtagcgattgccggcgtccaccagtttgatgatgttattgatcgactgatgttcgtattcgctgccgatatagacctgcgccgccaccgcgcatacgttgagccgcagcgcgtcttccatcgccaccgccacacattcgttggagagttcgcttaaaatcgaattgccgccggaggcgcggagcaccaccggcttattggtggccgccggtacctggctgcgcagtacgccgcgggtacacatcagcacgtcggtgtcggcaaacagcggcgcaatcgacaggtcgatacgctccagcccggtggttggcccctggaagtaaccgtgatcgaaggccagcatcaccgtgcggttgctgtgcggattaaaaatgcgcgccagccgcgactgcatgccccagtccagcgagccgcagcctttcagggtatacagcgtattctgctgcgggcggtcaataccgaagtctttcccctctttgatatcgtctaaatctgccatctcatcctccgtcagaagtcgtagttgttgatgttctctttgctgaacaccacgcgctccggcagcagcacgataccgttgcccttcgcctcatactggtagccctgcacgctattcggttcgaccttcagcgagccgatatctttcacctcaacgctgtcgcctacgttaagatcgccctttttcagcaatcgatcggcgacgttaaccgcaattttgccctgctgaaccacatcccacaggccgaacgctttcaccgtgccgcgctcaacgtacgggcgcatcacgttcggcgtactaaagccgacgatcgccacgccctgacgcttgaggttctccgccgcctgcgccgccgccggcagcgcattggcatccggcgcgataatggcgtcgagatccggataggcttttaagatcccctcggcggtttgcagcgatttggtggcatcgttatagccgaactgagtggtgacgatttgccactgcggatgctctttttcgattttggctttggcttccttcacccactggttctggtcggtcaccgtcgggctggagtagaaaaacgctaccttggcagtaggcttcgtcacctgcttttccgccatctcgaccagcaggccgccaagctgctgcggcgtgccctgattgatatagatgctgcggcactccggcctggtatcggaatcccaggtcaggactttcaccccgcgctgcatcgcccgcttcagcgccggacacaggccgtccggcgagacggcggaaacgataatcgcgttgtagccctggttgacgaagttgttgataagctgcacctggccggagacgctgggctcggtggggccgtcataggtgacatccacgcccagcgctttccccgcctctttcgcgccgttgccgccgctggtaaagaagccgacgccgaccagcttaggaataaaggcgatgcggtccgccgcctgcgcggtaaccacgctcatcgccagcgccagcacgatcagttttaatttcattttatgctccgattgttttatgcgagaaaagacgccgccaggtcgcgcgcacccattcacggtgcaggctcagcgaacgccccatcaccaccacaaccaacagcgcccctgacagcgcgctcgacacctggttggggatgccgaccatctgtaaaccctgttgcagataccccaccagcaatgccgccagcgcggtacccagtatcgatcccgagccgccgtaaatattggccccgccgagcaccgccgcggtcagcgccggcatcagcaggtcgcggcctaaatccgaacgtgccgagccgaaataggagaccatcaccagcgccgcgaccgccgaggcgacgcccaccaggccatacagcacgtacgggatgccgttcaccgacagcgcggcatagcgcgcggcgcgcgggttttgcccgagtaaaaagaggtggcggccaaagcgcccgcgatgggtcagcagccagaagaaaaaggtgataatcgcgaacagcaccagcggcagcggcagtccggcgagggttaaattggcgaaggcggtgaagctatcgggaaaaccgccaatcccctcgtaaccggtcgcgccggccatcccggaaagcagcagcgcgccgccgccgtacagatacagcgtaccaagcgtgatcaccagcgggctgatgccggtgtagtggatcagcgcggcgttgaataacccgcacagcagtcccaagagcaacgtcagcgataccgcgagccacagcggccagcccgcctgggtcatcaccccgagggcgatggcgcacaggccgatggtcgagcccagcgaaatatcgatcccgccgctgatgatcaccagcgtcagcggcagcgcgacgatgccgatgcagataaagtcgctggtgctaaagagcagcatattgagatccagcatgcgcggattcagcgcgccgaacagcaggatctccacgatcagcaacgccagcagcgcgctttcccagttaagcttcagcttcatttaagccacctctttgcttttgcgttcgggaaagcgggcaacctgtttcccccctttgttaccgggctggaaacggctgtactttagcgcccgctgatggcgggccagcgcctgacgcagacggccatcgagcaccagcacgccgagcagcaccaggccggcgataaagtcgttccaccaggcgggaaggcggaacagcaccagtacggtgtcgatttgggtgaggaaaaaggcgccgagaaacgcgccaagcagcgtgccggtaccgccgagcagcgagatcccgcccagcacgcaggcggcgatggctttcatctccaggccgctgccggtctgattaggcacaaaaccaatctgcgcggcgaagacgatcccggcgcaggccgccagcataccgttgagggtaaaggccagcatccgcgtgcggttgaccgccacgcccagttggcgcgcggcggcgaggttatcgccagcggcgtaaaaatcacgaccaaaggcggtgcgcgacagcagccagccgcccgccagcagcagcgccagcaccagccagcccagcggcgacacgccgataaacgcgggctccgagagcgatttcaggctgtcgggcaagccttcgatccatttcccgccggtccacagcaacatcaccccgcgatacaaccccagcgtaccgagcgtcgcgacgatcgccgggatgcgcagccccacgaccagcaggccgttaaaagctccggccagcgcgccaatcgccagcgcgaaggcgatagccgtcgccaacccatagccgttgttcagcgccacgccgacggcgatggcgcatagcccaacggtcgaacctaccgacacgtcaatattgcgggtcagcatcaccagggtcgcgcccaatgccagcaggcagaggatttgcgagctggagaaaatcatcgccagggtctgcaggctgaaataggctggattgagcgccaccagcacaacaaagagcgccacgatggcaaagaaggcgctcagttcgcgattcttgagtaacgttttcatgcctgccctccaaaggccagggtcatcatgcgatcgacggtcaccgcctgccgcgccagctcgccgctgtagcggccctgatgcatcaccagcacccggtcggcaaggccaacgaactcatccagatcgctggagatcatcagcaccgccacgttttgcgcggcaacgcttttcagcagctgatagatatcggcgcgggcggagacatccacgccgcgcgtcggctcatcgacaatcagcagtaacggattagcttccagacagcgcgccagcagcaccttctgctggttaccgccagagagagtgcgcaccggctgatcgccatcggccagcttgatccccagtgcccggtgatagcgttcaaccaccgccgcctcccgtttcccctgctgccaccacgacggctgattgaacatcaccgtgttccagcgcaccggcgcatcgagaaacagccccgagacctggcggtcttccggcagatagaccagcccgctggccaacctggcgcgggtgctgtcgcagctaatctcgcggttctccagccagattcgcccggcgcgcggtggacgcaggccgtataaggtttcggcaaattcggtgcgcccggatcccaccagcccggccagaccgacgatctctccggcgcggatctccagattgagatcgataaagccttcgccggtaagatcttccacccgcagcacgggaaagtcctgcggttgcgtacggcggttgcccggtagcgacagccacagcttttgcgtgtcgctcagcgcatggtcgcggctgaccggcgtcatcgcgttaatcagttgttcgtcgcggtatgccgcggtctcgccgctcagcaccaccgcgccgtcgcgcatcaccgaaatatggctggcaagctggcggatttcgggcaatttgtgtgagataaagacgatcccaacgtccagcgcctgtaacgcacggatctggctaaagagcctctcggtttcacccggcgttaaagaggcggtgggttcatccaggatcaggatcctggcctcgcgcatcagcccgcgcaggatctcgaccatctgttgatcggctacctcgagcgtgctggcgctggcgtcgaggttgatctggcagttcaacttctgcagtttgtcctgcaaccgcgcgacggtatccgcccgcttcggcaaacgaaagagaatgttctcgcgcacgctgaggttgggaaacagcatcggctcctgcggcaccagatagatgcctaactgatgagccagcgccggattgaggcgcgcaaacgcgcggtcgccgatcgtcagttcaccgttatccggggtttcgacgccggcgatgatcttcatcagcgtcgatttacccgcgccattgcctcccatcagggcatgcacctggcccgcgcatagcgtaaagtcgatgcccttcagcacggcaacgccggagaactgtttgcggatctggcgagcttcaagcagtggcttcatcatcgcgcctcgattgaacaaatgatttttaaatttaataatgttcaaaagcgtagacggtgaactatatttacaaccgtgcgaagatcacactttggtgctttagatcgtcaggaaaaaataggccagcgatgaaagatccgttttgccagtcggctcacactttccgaccgcgcaatagcgaacatatgatctaaatttttataagagttcaatttatgagcgaaaaacgcattacggaagagaaccgctacgccgggctggcgttagccgaggaagagctggtggcgcgggtggcgtggtgctactaccacgacggcctgacgcaaaatgacatcggcgagcgtttggggctgccgcggctgaagatttcccgtctgctggagaaaggccgccagtccggggtgatccgcgtgcagatcaactcgcgctatgagggctgtctggcgctggaaagtgaactccagcagcgctttggcctcaagattgcccgtgtgctgccggcgctcaacaccccgccgatgaatacccggctggggatcggcgcggcgcaatcgctgatgggcattctgcagccgggacagctgctggcggtcggcttcggcgaagccaccatgagctgcctgcagcatctcagcggctttatcggctcgcagcaggtgcggctggtgaccctctccggcggcgtcggcccgtatatgaccggtatcggccagcttgatgccgcctgcagcgtcagcattatcccggcgccgctgcgggtctcttcggcggaggtcgccgagatcctgcgccgcgagtcgagcgtgcgcgacgtgatcctcgcggcgacggcggcggacgcggcggtagtcggcattggcgccatcgatcagcggcgcgacgcgaccattctgcgctccggctatatcagcgagggcgaacagctgatgtacgcccgcaaaggcgcggtcggcgacattttaggttatttcctgcaggccgacggcaggccggtagaaggactggagatccatcgggaactgctcggcgtgacccttgatgagctggcgcagctgccgaccatcgttggcgtcgccgggggagaagaaaaagcgcaggcgatttatgccgctctgattggcaagcgcattaatggcctggtaacggaagagacaacagcacgcgcggtactcgcgctggcctcctgacggccaggcgccgcgcgaccacagcgaggcgcatgtcatgagttacctgttagcgttagatgccgggaccggcagcattcgggcggtcattttcgatcttaatggccgccagctggcggtaggccaggccgaatggaaacacctgagcgttgataacgtccccggctcgatggagttcgaccttaccaccaactggcagctggcctgccagtgcattcgccaggcgctcgatgccgcccggctctctgccgccgatattcagtccgtcgcctgctgttcgatgcgcgaagggatcgtcctctatgaccgcgacggcgaagccatctgggcctgcgccaacgtcgatgcccgcgccagccgcgaagtggcggagcttaaggagatccacgactatcgttttgaatccgaggtgtacgaggtctcgggacaaaccctggcgcttagcgccatgccgcgcctgctgtggctggcgcaccaccgccccgatatctaccgcaaagcggcaaccatcaccatgatcagcgactggctggcggcgaagctatccggcgagctggcggtcgacccgtcaaacgccggcaccaccggcatgctcgatctgttcagccgcgactggcgtccggcgctgctggatatggccgggctgcgcgccgatatgctgtcgccggtcaaagagaccggcaccctgctgggcgccgtcaccgaagcggcggcgcagcagagcggcctgcgcgccgggacgccggtggtgatgggcggcggcgacgtccagctcggctgcctgggccttggggtggtgcacgccgggcaaaccgcggtactcggcggcactttctggcagcaggtggtcaacctgccgcaggtgcgtaccgatccgcagatgaatattcgcgttaatcctcatgtcattcccggcatggcgcaggcggaatcgatcagcttctttaccggcctgaccatgcgctggtttcgcgacgccttctgcgctgaagaaaaactgattgccgagcgtctcggcgtcgatgcctattcgctgctggaggagatggccagccgcgtgcccgccggttcccacggcgtgatgcctattttttccgacgccatgcactttaagcagtggtaccacgccgcgccgtcgtttattaacctctccatcgatccggagaagtgcaacaaagcgaccctgttccgcgcgctggaggagaacgcggcgattgtctccgcctgcaacctggcccagatttcgcagttctccggggtaacattcgagagcctggtgtttgccggcggcggctctaaaggcgcgctgtggagccagatcctcagcgacgtcaccggcctgccggtgcgggtgccggtcgtccgcgaagccaccgctctgggctgcgccatcgccgccggaaccggcgccggattgtatggcgatatggccagcaccggagaacggttagtgagctggcaccgcgagttcaccccaaatccgcagcatcgcgagctgtatcaggagatgatgagcaagtggcagacggtgtacgccgatcagcttggccttgtcgatagcgggctgacaacgtcgatgtggcaggcgccgggtctggaacgccgccagcgcgttgtgtcctccccctcaccctaactaccggtgccgctccgcctttcccccctctccctttgggagagggccggggtgtggggcaacgcttcgccgttctttgaatcccatcacaatcaccgcactccccttttccctttttctccacgatggctaaattagtaactcatccgaccacataacaataattttacattggaagccactatgagccgctatccgtcgcttttcgccccgcttgagctgggcttcacaacgctcaaaaaccgcgtgttgatgggctcaatgcacaccgggctggaagagctgccggacggcgcgcagcggctggcggccttttacgccgagcgcgcccgtcacggcgtggcgctgatcgtcaccggcggcatcgctccggcgccctctggcgtcaccatggccggcggcgcggtactcaacgacgccagccatctggcgcatcatcgccatattaccgacgcggtacatcaggaaggcggcaaaatcgctctgcagatcctgcacaccggccgttacagctaccagcccgcgctggtggccccctcggcgctacaggcgccgatcaaccgttttaccccccatgaactgagccacgatgagatcctgacgctgatcgatgattttgcccactgcgcccagctggcgcgcgaagcgggctatgacggcgtcgaggtgatgggctctgagggctatctgattaacgaatttctcgccgcgcgcaccaaccagcgcgacgaccaatggggcggcgattatgccaggcgcatgcgtttcgccgtagaggtggttaaggcggtgcgccagcgcgccggccacgatttcattatcatttaccgtctgtcgatgctcgatctggtcaacgacggcagcacgctggcggaagtcaccgaactggccaaagcgattgaagcggcgggagcgaccatcatcaacaccgggattggctggcacgaagcgcgcattccgaccatcgccacgccggtaccgcgcggagctttcagctgggtcacccgcaagctgaagggcgcggtgtcgatcccgttgatcaccaccaaccgcattaacgatccgcaggtcgcggaggatattctcgcccgcggcgatgccgatatggtatcgatggcccgcccgttccttgccgacgccgaatttatatcaaaagcgcaggacgatcgcgccgatcagatcaacacctgcatcggctgcaatcaggcgtgtctcgatcggatcttcgtcggcaaagtcacctcctgtctggtcaacccgcgcgcgtgtcatgaaaccctgatgccggtcctgcctgccaacgcgcctaaacggctggcggtggtcggcgccgggcctgccggtctggccttcgccgtaaacgctgccgcccgcggtcatcacgtcacgttgtttgatgcgctcccggagatcggcggtcagtttaatatcgccaaacagatccccggcaaagaggagtttcacgagacgctgcgttactaccgcaccatgctcgatcttcatggtgtcgatctacgcctgaacacccgcgtcacgacagacgatctgctggcgttcgatgagacgatcctcgccaccggtatcgccccgcgcctgccggcgatcgatgggatcgatcatccaaaagtgctgagctaccttgatgtcttgcgcgataaagcgccggttggcgcgaaggtggcgattatcggctgcggcggcatcggcttcgacaccgcgatgtttttaagccagtcgggcgcggccaccagccaggatatcggcgagttctgccgcgaatggggtatcgataccagcctgcaaacggcgggagggctgagtgctgaaggcccgcaactgagtaaaagcccgcgacagattgtgatgctgcagcgcaaagccagcaaaccgggcgaagggctcggcaaaaccaccggctggatccaccgcgcgacgctgctggcgcgcggggtgaaaatgatcccggcggtcagctatgaaaagatcgatgatgaagggttacatgtcactatcggcggcgagcgccagctgttggcggtcgatcaggtggtgatctgcgccggtcaggagccgcgccgcgagctggcggatccgctgcgcgcggcggggaaaacggtgcatctcatcggcggttgcgacgtggcggcggagctggatgcgcgtcgggcgattgcccagggcactaaactggcgctggcgatttagccctgtcccgggggcggcgcgatgcgccttccccgggctaccacgataatcccgcacgctagcccggctaaggcgacagccgcgagccgggggaaaccgcgacaagaatcagcgctgcttacgcaccttggttgctttcaaaatgacaaacttattgttcgtcgcaatcgtcgtgcaattaccaaacgcgcgcttcagcttacggaagtaatcgaggtggcggttgccgacgacgtacagctcgccgccgtatttcaggctgcggcgggcatcgttaaacatctgccaggcgatatggtcggtaatagcgtgttgctgatggaacggcggattacacagaatcgccgtaaagcggtcaggctcaatgccggagagcgagttgttgaccatgaattcacagcgtgcgatatcgtccggcagattgcgctcgacgttcaaccggctggaagccaccgccatgtgcgactcatcggtaaacatgacccgcgcgttcgggttctgcgccagcgcctgcaggccaatcaccccattgccgcagccgagatcggcgatctcgccttctagatcagacggtaaatgctgcaggaagaaacgcgcgccgatatccagcccgctgcgggcaaaaacgttggcgtggttatggatggtccacggcgtgccgtccagcttccagctgtaggtttgcggcgcatcggcaagctcaggagcggtgaaaacgcagtggatcagacgcgcttttttccacgccagcgaggtggtggtggtgccgaggattttttcaaacagcgccagcgtcgagttgtgcacatcacgggctttcgccgcggcgatgatgcgggtttccggcgtaactacttcgcgcagggcgcgcagctgctgttccagcagcgccagctgttttggcaccttaatcagcaccagcgccggcgcggccggtagcgggctcaggctatcctgaaagcgcacgctctcttcatcgataccgttcatccgcaggttgtggcgggtcgccagctcggaaataaaggagtcgttgatactgaccgggttgcgctccgccagcgcgcaggcgagcgcgccgaagccgtcgttgaagatgagcgtcaggccgtcgacgtcattcacctgttgcagcagatattcatccgccgcttcccatgcctgaagcgcttcttcttcagcgttaggtgggaaccgctctaatgtgaataactcaccgtttaactctgcctggctcatcgcctctccgcctccggaatagtaaaacccgcgagtttatacgcaaatcctgtccagttgaagagagatcgctgatcatcgccgctcagcgtagatcgccctcgtcatcggctcgcagcagcgttatcgacgcgcgagcgccgggcatcagctgctgcagataacctaccagccgctctcccgcctcatgcagggccgacaacggcatcgccggcaggctttcgagaataaaccacatcgtctgcgcgccgctgtccagccgggtgcgcacgccctgtcgccagttccagcgtcggcaggttacgcctatatcatcccgccagatgacttcgcccggctccggatattccactaccggctctgccgattttagcgtatcgaatggctcatcgccgcgggcaatggccagccgcggttcgccacggtaggcggccagattttccccaccgaccgggacggcatagcgaatgctgatcgcgttgtagatatccaccaccggatcgatggccggcaggctcccctctttcagcacccgcttgcgcagcgcctgcgccgaacagggggtacgtttcgccttcgcgccgaaggcgctgaacgcttcatcccatgccgccaggtgcgcttgcgcccagggcacatcatcctgctgcaccgccaggcaggcctcggccagcgcctgctccgcgacggcgggatcggccaccggcgcgctctccaccacaatacttaatgcccgaaagcccggcgccaggcggctgaccgcagattcgattgacggcgttacgctacgcattcgataatcctgtaatgaccaatttgtttcatcatagtgaccaatgaacgtaaaagtcaatataacgaccgattcaggatctgatgtcgaccaggtaagtcgcgccgtcgccacgcggctgaaggcctaccgtaaagcgaaaaaaatgtcgctggacgagctgtcgcgccgggccagcatcagcaaaggtatgctggtcgagatggaaaaagaggccgccaatcccagcattgcgatcctctgcaaactcgccgccgcgctgggcgtctcggtggcggatattgtcaatgtgtcaagcgaacccgcgttgcatattattcccgccgagcagatccccaccctctggcaaggcccgctggggggcagcgccaggctcctcgccggcaccgccgggccgaatatgattgagctgtggcgctgggagatgcagcccggcgaagcctttgcctcgcctggccacccggcaacaaccttcgagctgctgcacgtggaagccggcgcgctgacgctgacgcttggcgagacctgccgcacggtggcggccggggaatcggcggtggcccgcaccgaaatagagcacggttaccgcaatgagggtaccgcgccgctggtctttaccatgaccgtggctgaactgccctcctgacagacataatgataagacgatgacaaaactcatttatttacagggctatcctgaatcgctgctggcgcaggtgaccacgttaatcgagcaagaccgcctcggcgaggtgctgcaaaagcgctatccgcaagggcacgacgttaacagcgataaagcgctgtatcagtacacccaggacttgaaaaaccgctttctgcgcggcgcggcgccgatcaacaaagtgatgtatgacagtaagatccacgtgctgaacaatgcgctcggcctgcataccgccatttcccgcgtgcagggcggtaagctgaaagctaaagcggaaattcgcgtggcgacggtatttcgcgacgcgccggaagcctttctgcggatgatcgtggttcatgaactggcgcatctgaaagagaaggatcacaacaaggctttttatcagctgtgctgccatatggagccgcagtaccaccagctggagttcgacacccgcctgtggctgacgcacctttcgttaaatcgttctgcgtagtgacgcactggttttgtcatgacggcatgatagagtggcggcaggttccctttaacggagttcgtcaacgtttatgatacgtttcgcagttgttggcacaaactggatcaccaagcagtttgtcgatgccgcccatgaaaccggcaaatataaacttaccgccatctactcccgcagcctcgaacaggcgcaagccttcgccaaagactatccggtcgagcatctgtttacctcgctcgatgaactggcacagagccctgacgttgacgcggtctatattgccagcccgaactcgctgcactttccgcagacccggctgttcctgagccataagaagcacgtcatttgcgaaaagccgctggcgtcgaacctgcaggaagtcgaggcggcgatagcgctggcgaaagaaaataacgtggtgctgtttgaagcctttaaaaccgccagtctgcctaactttctcctactgaaagaaacgctcgctaaagtgggcaaactacgcaaagccttcatcaactactgtcagtactcctcacgctatcagcgctaccttgacggcgaaaaccccaacacctttaacccggcgttctctaacggttcgattatggatatcggcttctattgcctggcgtccgctgtggcgctgtggggcgagccgcgggccgttcttgccaccgccagcctgctggacagcggcgtagacgcccagggcaccgtggtgctgagctatggcgacttcgacgtgacgctgcatcactccaaagttagcgattccgcgatccccagtgaaattcagggcgaagacggcgcgttagtgatcgaaaaaatctccgaatgtcagaagctggcgtttgtgccgcgcggcggtaaagcccaggacctgacgcagccccagcacattaataccatgctgtatgaagcggagacctttgcgcgcctggtggagacacaggatgtggatcacccgggcctggcggtgagccggatcaccgccaaactgtccagcgaaattcgtcgccagaccggggtgatcttcccggccgatacgcagccgctggcgtaaaagagtgtaaaggcctgaccggccgccattgacgaaaaccgccctgtgacatattttgttacgtgcaaaggggagtaacttccttgccggttgatcgtcattacgatgcgtgcaataccgcatccggtcgccgggcaataaccaaagcccatcgcgatgtactttggttgttgtaagtgagaccttgccggaaggcgaggtctatgcataaaagcgcagcggctgccgtcttccgacgtcagccgttttgtttttatgtaaggaatatcaaatgaatactgtcggcacgccgttgctatggggtggattcgctgtcgttgtcgcgatcatgttggcaatcgacctgctgcttcagggacgacgcggttcgcatagcatgaccatgaagcaggccgctggctggtcaatcctctgggtcacgctttctctgctgttcaacgccgccttctggtggtatctggtgcaaacccagggccgggccgtcgccgatccgcaggccttagccttcctcaccggttatctgattgaaaaagcgctggcggtcgataacgtcttcgtctggttgatgctgttcagctatttcgccgtaccgcctgctctgcagcgccgggtgttggtgtatggcgtactgggcgcgatcgttctgcgtaccattatgatcttcgccggcagctggctgatttcgcagttcgactggctgctgtacgtctttggcgccttcctgctgtttaccggcgtgaagatggcgctggcgaaagaggacgactccggcatcggcgataaaccgctggtgcgctggatccgcagccatctgcggatgaccgataaaatcgagagcgagcgcttcttcacccgtaaaaacggggtgctgttcgccaccccgctgctgctggtgctgattctggtggaactgagcgacgtgattttcgccgtcgacagtatcccggcaatcttcgcggtcaccaccgatccgtttatcgtgctgacctcgaacctgttcgccatcctcggcctgcgcgccatgtacttcctgctggcgggggtcgctgagcgcttctcgatgctcaaatacggtctgtcggtgattctggtgtttattggcgtgaagatgctgatcgtcgacttctaccatatcccggttgccatctcgctgggcgtggtgggcggcatcctggccgccacgctgctgattaacgcctgggtcaacaggcagcacgacaagcagcgcaaactgccagagtaatctgctaccgcgccgtcggccctcgctggcggcgcggtaatcagctatagcagacgttctcgtaacgagaatacctgctcatgtcacaattatgttactacgcagttaaaaaataagatccatattaaaatcacagtattttacgcttcccgccagtctttctttccgtatactcgactatgcaaacatctacttacatcctgacataaacgtaaaaaataatacgtggctgggatggcttgctacatcactggaaggaatgaattatgacaacacgcactccctcatcagggtggctctcccgcctggcgcaaggcagcctggtgaaacaaattttaatcggcctggtgcttggcgtactgttggcgctggtctctaagcctgcggctatcgccgtcggtctgctggggaccctgttcgtcggcgcgttaaaagcggtagcgccggtgctggtattgatgcttgtcatggcctcgatcgccaaccatcagcacggacaaaaaaccagtatacgccccattctgtttctctatctgctgggcacctttagcgcggcgctgaccgcggtgttgttcagctttctctttccctcgaccctgcacttaaccaccgccgccgacagcatcacgccgccgtcggggattgttgaggtgctgcgcggcctgctgatgagcatggtgtccaacccgatcgacgctctgctgaacgccaactatatcggcattctggtgtgggcggtggggcttggcttcgccctgcgtcatggtaacgacaccaccaaaaacctgatcaacgacgtctcccacgcggtgacctttatcgttaaagtggtgatccgctttgcgccgctggggatcttcggcctggtatcttccaccctggcgaccaccggtttcgagaccctgtggggctatgcccagctgctgctggtgctggtgggctgtatgctgctggtagcgctggtgattaacccgctgctggtgttctggaagatccgccgcaacccctatccgctggtgctcacctgcctgcgcgaaagcggcgtttacgcgttcttcacccgcagttccgccgccaacattccagtgaatatggcgctgtgcgagaagctgaatctggatcgcgacacctattcggtctctattccactgggggcgaccatcaatatggcaggcgcggcaatcaccatcaccgtgctgacgctggcggcggtgcatacgctgaatattccggtggatctgccgacggcgctgctgctgagcgtggtcgcttcgctgtgcgcctgcggcgcctccggcgtggcgggcggctcgctgctgctgatcccgctggcctgtaatatgtttgggatcccgaacgatgtggcgatgcaagtggttgccgttggctttattatcggcgtgctgcaggactcctgcgaaaccgcgctgaactcctccaccgacgccctgtttaccgccgcggcctgcatggcggaagacgaccagctggcgaaaaacgccctgcgcggataacgcctttcccctccgctatcgggcggaggggctctcttcctgtactgcgttttcaaccttaaacggatcgataccgcgcttttgcatccggcggaagcgaatgatgttcagcccgttgacgatcaggaaactgccttctatcagcgtcccgccaatggaacccaaccacagattatgcgtgacccagcaggcggtggagcaccacatcacgcagcggacggttagccctttgcagcgaaacagcgcccaggtgctggcgacggtgccaatgatcggcagcagctccatggcatgctgcagtttacccaggccgagaatcaacgtcaggaggataaagactgtcatcacccacaggctacgggtgcgtaaggaaatgaccgtgcgaagcgcattgagcccggcgctcattccagccggcccggcgcccatcaggaaaaaatgaacgccgataatagcgctatagaccgccagctgtagcctgaaacggcgttcatcgcggttgataaaggtggtaatgccgataagaaaggcgatgacgccgaccccctgggccagccaatacgcggtcatgtaagctccctgactgaaaaaaacaaacggcgcttcactggctgaaacgccgctgttacgagcccgatggcgctacgctatcaggccgatacacaaaccaagcctctgggcgccaacgcaaatacgcctttacagggtaacaccgcttttaaagatggccagctcgcggaagtcattctgctcattacaggtcggtttaccgttggcgaaggctacaatggcatccacaaactcttccagcagctgcggcatcgttttgccgtggagcagctgcccggcatcaaagtcgatccagtgctttttcttcgccgccagctcgctgttggtggcgatcttcaccgttggcacaaagccgccgtacggcgtgccgcgaccggtgctgaacagcaccatatggcagccggcgccggccagcgcgctggtggcgaccgcgtcgttgcccggcgcgctcagtaaattcagaccatgaaccttcaggcgctcgccgtagcgcagaacatccaccacctggctggagcccgctttctgagtacagcccagcgacttatcttcgagggtagtgatccctccggccttattacccggcgaggggttttcgtaaataggctggtcgtgagcaataaagtactgcttaaagtcattgaccatggtcaccagcttgtcgaaggtcgcttcgtcgcggcagtggctcatcaacaactgttcagcgccgaacatctccggcacttcggtcagcacggtagtgccgccgttggcgatcacatagtctgagaagcggcccagcatcggattagcggtaatgcccgacaggccgtccgatcccccgcactcgaggccaaacttcagctcgctgagcttgcccggctggcgtttatcctgacgcatcacttcatacagctgatgcagatgctcaacccccgcctccacttcatcgtcctgatgctggcaaaccataaagtgcacgcgctgcgggtcaaactcgcccagcgtctcgcgaaaggcctccacctggttgttttcacagccaaggccaaccaccagcaccgccccggcgttcgggtgacgaaccatattttgcagcatggtgcgagtgttgatgtgatcgtccccaagctgcgagcagccataggtgtggctgaagagatgtaccccatcgatatcctcagcgccatacgtctctttcaggaaacggttctgcatttgtctggccatcgcgttgacgcagccgacggtcggcaggatccacagctcattgcgcacgccgacgtcaccgttggcgcgacgataaatctgtacttcgcgatccgcaggctgtggcggttgggcaaccaggtccggttgatagcgatacgcgtcaaggtcgctgagattggtgcgcgtattgtgcgcatgaacatgctcgcccggcgcgatatccgccagcgcatggccaatcggcaacccgtacttaacgacgttttcccctttcgcgatagcgcgcagtgcaaacttgtggccgcgaacgatatcctggccgagggtgaccgagtcattatcaatcgtcaccacgctaccggcagcgatatccgtcagcgcgaccgcgacgttatcctgcgaatggattttgatgtattgcatatcaaccgacctctggccttagttcagttcaatggcgaaatagtcacgcgcattgttaaagcaaatgtttttcaccatctcgcccagcagcgcgatatccgcaggcgcttcgccggcagccacccaacggccgatcatctggcacagaatgcggcggaagtattcgtggcgcgtgtaggagaggaagctgcgactgtcggtcaacatcccgacgaagcggctcagcagcccgagctgcgccagctgggtcatctgccgctccataccgtctttctgatcgttgaaccaccagccggagccgaactgcatcttgcctggcatgccttcaccctggaagttaccgatcatggtgcccagcacttcgttatcacgcgggttcaggcagtagagaatcgttttcggcagcaggttttcttcgttctgcttgctcagcagcttagacagctcttccgccatcggacgatcgttgatcgagtcgaagccgacgtctggccctaacagtttgaactgacggaggttgttgttacgcagcgcgccaatgtggtactgctggacccagccgcgacgggcatactctgcgccgaggaacaccagcaccgcggttttgaactgcgccacttcgtgttcgctaagggtctcgccagccaggcggcgcgccagaatgtcatccagctcggcgtcggtcgcttcggcaaacagcaccacgtccagcgcatgatcggagactttgcagccgtgtgcggcaaaatgatccagacgtttggtcagggcgctttgcaggtcagcgaagcggcgaatatcggtatcggatacctcgcccagcttagccatataatcattgaaggtcgccaactcgatgttgaaggctttatccgggcgccagctcggcagcactttgatgtcaaaggagttgtctttggcgacagccgcgtggtgctcaagagaatcaatcggatcgtcggtggtaccgaccatcttcacattcatctgcttcatgattccgcgggcggagaaggcatcctgagccagcaaatcattacactggtcccagatctcatcggcggtggatggcgacaacagcttacctgtaataccaaaaggtcgacgcagctctaaatgggtccagtggtataacgggttgccaatagtgtgtggaaccgtggccgcccaggcgtcaaatttctcgcgatcggacgcatcaccggtacacagacgctccggcacgccgttagtgcgcattgcgcgccatttatagtgatcgcctttcagccagatgtcatacaggtttttaaagcgatagttttcggcaacctgctgcggcggaaggtggcagtggtagtcgaaaatcggctgatctttggcgtaatcatggtacagacggcgggcaaactcggtatcaagtagaaaatcttcagtcataaacgatgtcattcgcgtgtcctcttcgctccagtgcgggagcctttcagatgattgactacaatgctgacaaagttatcacaccaatttctacagaccgaactgtttttcgtgagttagatcaataaacgtcgataaaaaaatgaccgccctggagcaaaacacctcgccagagcgcgccatctctggctttccaggcaagggataaagaccacactaactttcccacttttgtgacagctctcaacttttaaagttgtatgacaagttatctttctgccgtcgcaacatataaaccgacggaatgcattaccggtgcttatggcatcggcttatacggaatggataccgactttcaacataacaactgatggtaaggttcaggccagaggggactaccctcctgaatcctccgtttcgctttcccggccgcttattgcgctcggtaaaggccgcacctgatgcggaaagataacagacgatgaggtttacatgcgtaaaattaaagggttacgttggtacatgatcgcgctggtgacgctgggcaccgtgctgggctacctgacccgtaacaccgtagcggcggccgcgccgacgctgatggaagagttacacatttcgacccaacagtactcctatatcattgcagcctattccgctgcctataccgttatgcagcccgtcgcggggtatgtccttgatattctggggaccaaaattggctatgccttcttcgccatcgcctgggcggtattctgcggctcaacggcgctggccggcagctggggtggactggcgctggcccgtggcgcagtcggcgcagcggaggccgcaatgatccccgccggcctgaaggccagctcagagtggttcccggcaaaagagcgctctatcgcagtgggctacttcaacgtgggttcctctattggcgccatgatcgcgccgccgttggtggtgtgggcgattgtcatgcacagctggcagatggcgttcatcatctccggggtattgagcttcgcctgggccatcgcctggcttatcttctacaaacacccgcgcgaccagaaaaaattatctgacgaagaacgtgactacatcattggcggtcaggagtctcagcatcagaccaataacgcgaagaaaatgtcgccgtggcaaatcctgcgcaaccgtcagttctggggtatcgccctgccgcgcttcctcgccgagccggcctgggggacctttaacgcctggatcccgctgttcatgttcaaagtttacggttttaacctgaaagagatcgccatgttcgcctggatgccgatgctgttcgccgacctcggctgtatcgtcggcggatatctgccgccgctgttccagcgctggtttggcgtcaacctgatcgtgtcgcgtaaaatggtggtcaccatgggcgccctgctgatgattggcccggggatgatcggcctgttcaccagcccgtacgtggcgattgccctgctgtgcatcggcgggttcgctcaccaggcgctgtccggggcgctgattaccctctcttccgatgtctttggccgtaacgaagtcgctaccgccaacggtctgaccgggatggccgcctggctggcgagcaccatgttcgccctggtcgtcggcgcgctggctgacaccatcggctttagcccgctgtttgcggtactggccgtctttgacctgctgggcgcgctggttatctggacggtgctgaaaaacaaaccggctgacgatgactcgacgccgcttagcagccgcaaaccggtcacgcagagttagatcgaatggcaaggtaatcgccgatcaagccgccttctcaggcggctttttcatgcctgccagtggtggaaagcgcgtaaaagtggtataacaaatcgaatattgtcgccatcttccgggagcgaatatggaaatcattgaaccacgccgtctatatcagcagcttgccgctgagctgaagacgcgcatcgaacaaggtgtctaccttgtaggggataagctgcccgccgagcgcttcatcgccgatgaaaaaaacgtcagccgcaccgtggttcgtgaagccattatcatgctggaagtggaagggtatgtcgaagtccgcaaagggtcgggtatccacgttatctccaaccatccgaaataccagcaggtggccgatgaaagccttgagttcgccaactatggcccctttgaactgctgcaggcgcggcagctaattgaaagcaatattgccgaattcgcggcgactcaggtgaccaaacaggacatcatgaagctgatggagattcaggagaaagcgcgtaacgagaaatgtttccgcgactccgagtgggacctgcagtttcacgtccaggtggcgctggcgacgcagaacagcgcgctggcggcgatcgtggaaaagatgtggacccagcgcgtgcataacccctactggaaaaagctgcatgagcatatcgacctgcgtacggtcgataactggtgcgacgaccacgatcaaatcctgaaagctctgctgcgaaaagatcccaacgccgccaagctggcgatgtggcagcatctggaaaataccaagcaaatgttgttcaacgaaaccagcgatgactttgaatttaatgccgatcgctacttatttgccgaaaacccagtcgttcatctcgataccgcagtcaacggcgcgaaataaggccttatccctccggcgcgcccccctgcgcgcctgtctgacagtgaggctggagtaagcaagtcatatatagtgtcagcctgtgtaaatcctctcgcctcccatctccgcaatcagcaaaatcaacgagcaacaccttgcaatttctctgacggaaagtcaggtgatttgttacaattagatgcattttgtcgttctggggggtaggtatttacttacttcagtcttatacagggaagcgttcagagcgcctaagcagcgaccataatctcataaaaatcttgtcgccctatatgccacgcgctcagacgtgccgttaaccgatgtaccaggaatcgtgaatggaactatttacccagttattgaatgccttgtgggctcaggattacgaaacgctcgcgaatccctccatgataggcatgctgtattttgtcttgtttatgattttgttccttgagaacgggttattgcctgccgcgtttttaccgggggatagtctgctcgtgctcgtgggcgtgctgatcgccaaaggggcgatgggttttccggaaactttgctgctgctcaccgccgccgccagcctcggctgctggctaagctatattcaggggcgttggctgggtaatacgcggatcgtgcaaaactggctgtcacacctgccttcgcactatcaccagcgtgcgcatcacttgtttcataagcatgggctctccgcgctgctgatcggccgctttatcgccttcgtacgcacgctgctgcccaccatcgccgggctttccggccttaataacgcccgttttcagtttttcaactggatgagcggcctgctgtgggtgctcatcctgacctcgcttggctatctgctgggtaaaaccccggtattcctcaagtatgaagatcagctgatgtcctgcctgatgctcctgccggttgccctgttggtcttcggactgatcggctcgctggtggtgctgtggaagaaaaaatacagaagccggggctaatgatggtcatgaaacgcccttccctgcgccagttcagctggctgctgggtggttctcttctgctcggcgccctgttctggctttggctggcggtgcagcagcaggaggccacgctggcgatacgcccggttggccagggtatcggaatgccggacggtttctccgtctggcatcatctcgatgccaacggcatccgctttaaaagcatcacgccacagaaggatggtctgctgattaagttcgattccaccgcccagggcgcggcggcgaaagaagttctcggccgcgctctgccacatggttatattattgcccttctggaggacgataactcgcccaccgcctggctatcccgcctgcgcgacgcgccgcatcgcctcgggtaagctgccgccagactgcgtttttaacccagtctggtggtttcccgcatttgttactatgcttaaacctgcgggaatcaacgcattcacgttcaccaacgggaacgggtatatcctccgggtatcccctcagacaatggaaggtactatccatgaaacaccgcatcgctctgcttctggtcctgacttcacttagcgccagcgccctagccgcctctccctgccaggaaaaagagcaggatattcaacgagagatcagctacgccgaaaagcatcataatcaaagtcgcattgatgggctaaataccgcgctacgtcaggttcgggaaaactgtagcgacagtaaactcaaagccgatcataagcaaaaaattgccaaacagcgggaagagatcgctgaacgtcagcgcgatctgcaggaagcccggaagaaaggcgatgcggacaaaattaacaaacgccagcataaactcaatgaagcgcaacaggagttaaaaacgctggagtctcgggattactaatcaccattaactttcgcaacacggaccacgctacaggagaacgacatggctaaagagaatgtgactgacgaccttcgtgcagaactgaaaacgctggcggataccctggaggaagtactaaattcctcggcggacaagtcgaaagaagagatgggtaaactgcgcagtaaagccgagagcgcgctgaaagagagccgcgctcgtttgggtgaaaccagcgaagcgattcttcgtcaaactcgtgagaccgccgcgcgagcggatgattatgttcgcgaaaatccgtggactggggtaggaattggcgccgccgtcgggctggtgctgggtgtcctgctgtcgcgtcgctgattatggcgaatactcaacacacgcagggaccgggtcagcgcgttttctccattggtcagcgcatcgtcacgctgctggtcgaaatggtggaaacgcggctgcgtctggtcgtcgtggagctggaggaggagaaagccaacctcttccagctgctgatcatgaccggactgacgctgctgtttgccgcgtttggcctcatgagtctgctggtgctggttatctgggccgttgacgctcagtaccgcctgcacgtgatgatcgccaccaccgttgtgctgctcctcgccgccgcgatcgtgggtatcctaaccctacgtaaggcgcgccgctccacgctgctgcgtctaacgcgtaaagagctggagaacgaccgtgcccttctggaggaggataaatcgtgaatggccgacaggagcgtgaacggcaaaagacgcagctgctgcgccagatccagcagcaacggctggagctcagcgcctgccgccgtcactggcacgaggcgactgcgcccctcgaccgcggctggcatacgctgctgagtttacgttcgtggctgatggttggcagcggtctgatggccgtatggtccgtacgacatccgcattttttaatgcgctggaccaaacgcggactcggactgtggagcacctggcgcctggtgcgcgggatcctgcgccagtcggcagttcgctaacggccctgagcgtgggcgctttccctggcgcccacgctctgccatttccctgtcccttactgcacgctgttcgcagcaacatgcgccttttccgtagcgcgcccttctctacgacgccctttaccttacgccataccaggtccggtggtggcccatcgcgttcggtactctttcgcctccgcgtactgattgctcagaaactttgaaatagatctacagttttccttgctaacaattccctctccgcctcgctactatcctctccatcgacagcaacaccgcgtaactacgcgggattgcactaaaaaacaaaaccgccgccctttgggttttctggagtaacaaatgaaaaaattagaagatgttggtgtattggtagcgcgtattctgatgccgattctgtttatcactgcaggatggggcaaaatcaccggttatgcgggaacccagcagtatatggaagccatgggcgtcccgggcgcgctgctgccgctgaccatcctccttgagttcggcggcggtctggcgattctgttcggtttcctgacccggaccaccgcgctgttcactgcgggctttacgctgctgaccgcgttcctgttccatagcaactttgcggaaggcgtgaactccctgatgttcatgaaaaacctgaccattgcgggcggttacctgctgctggccattaccggaccgggcgccttcagtattgaccgtgtactgaataagaaatggtaagcgcactatactgaatgaatgaaaaaagcgaggagaccactcctcgcttttgctatctgtagtctgaaggaggagcaaagatgggacaattagtcgacggcgtctggcaggatacctggtatgacacaaaatccaccggtgggcgttttaaacgttccgtttccgccttccgtaactggctgaccgccgacggcgcggctggccccagcggtgaaggcggttttgcagcggaaaaggatcgctatcatttgtatgtttctctcgcctgcccgtgggcgcatcgcacgttaattatgcgtaaattaaaaggtctggagccttttctccccgtatccgtggtcaatccgctgatgctggaaaacggctggacctttgacgatagcttcccggaagccaccggcgatactctctaccagcatgactttctctatcagctgtatctgcacgccgacccgcactacaccggacgcgtgaccgtgccggtgctgtgggataaaaaacagcagaccatcgtcagcaatgagtcggcagaaatcatccgcatgttcaataccgccttcgatggccttggcgcccgggccggggattactacccgccagcgctgcgggaacaaatcgatgagctgaacggctggatctatgacaacgtcaacaacggcgtgtataaagccggctttgccaccagccagcaagcttacgacgaagcggtggatgcggtctttacctcgctggagcggctggagcagatcctcggccagcatcgctatctgacgggcaatcagctaacggaagccgacattcgcctctggaccactctggtacgcttcgacccggtatatgtgacccattttaaatgcgataaacggcgcatcagtgattacctcaatctgtacggtttcctgcgcgacatctaccagatgccgggtatcgccgagacggtgagttttccgcatatccgtcaccactattaccgcagccataaaaccattaaccctaccggtattatttccattgggccgcagcaggatctcaacgaaccgcacggtcgcgatcagcgcttccgttgatctgtcgggcgccagtgatggcgcccaataattcagaaaacagatatttacccaccattcattcacgtctattcttattgcgatcgcttaaaaaacaagtgattgacggttaattgaggcgtagaaatggactggtatctcaaggtattaaaaaactatataggatttggcggccgtgcgcggcgcaaagagtactggatgtttattctggtcaacctcatcctgaccggcgtattgagcatcatcgataaaatgctgggctggcagcgggctggcggcgaaggcattctgaccactatctatggcgtactggtctttttaccgtggtgggcggtgcaatttcgccgtctgcatgacaccgatcgttcggcctggtggctattgctgctgttgatcccggtcatcggctggctggtgatcctgatctttaactgccagcgcggcaccgaaggcaacaatcgcttcggacccgatccgaaacccttctcctattaatcttcccgctcctcccgttaacgggaggagcgtcttcatcactatctgccggcaaacagcttggggatctcacgcagacaccaagacttcgcttcgcccatactgtcccgtcgccaggccataattatgtcaatttcattggtgtattccgggctgacaacccgcaaacgtccttcggcaatatccttctccaccagcggatagggcatggtcgccacacctagcccggccaacagggcctggcgcttgtcttcaatggtgctcaccgttaagcgcggctgtttatccaacaactggacggtgaggacgggccgctcgcgcgcggtatccgccaccgcgacgccgcggtatttcacgcgggtcacttccgagagcggttccggctcctggtggattgggtgatccggcgccgcgacgtacacattgagcaccgaatagagtttgcgcgagttaatctccgaggaggaacgaaaatgcatatccggcgcgacaacgatatccgcccgcccctgctccagccgctcccaggcgccggccagcacctcggtgataatcgataactgcgtattagatttggtcgccagtttttcaattagcggaaacagatccggggtgggcaccagcgcttcggtaacgatcgtcaggtgggtttcccaaccgcgcgacagggcttcagcatcggtggtgagtttatccgccgcttcaagcagcacgcgcccgcgctccagcagcattcttccaacgttagtgaacttcgtgcgatgacctgagcggtcaaacagcaccacgtccagttcctcctccagtttttgcatggtgtagctcagggcggaaggcacgcgtcccagctcatcagctgcggcagcgaagcttccgcgccggtcgatcgcatccatcacgcgtaacgcttccagcgttaatgctctctctttggccatcgctttctcattcaggaaatttgaacataccgggcagaatatctggctaacaatacagcgtccatacctttaccattgatttagtgtaaagagaggtcaagaacatgattactacccgaacagccaaacaatgcggacaagcagacttcggctggctgcaggcccgctacaccttctcctttggccactacttcgacccgaaattactgggcttcgcatccttgcgcgtcctcaaccaggaagtgctggcgcccggcgcttccttccaggccagaacgtacccaaaagtcgatatcctgaacctgattctggaaggcgaagcggagtatcgcgacagcgacggcaaccacgtgcaggccaaagccggtgaagcgctgctgatcgccacccagcctggcgtgagctatagcgagcataatctgagtaaagagcagtcgttaacgcgaatgcaactttggcttgatgcctgcccgcagcgggaaaacccgctgcagcagaaaatcaatgtcgcagacgcgacgctgcagctgctggcctctccggagggcggggataacagcctccagcttcgccaacaggcctgggtctaccatatcgcgctggagaaaggtgagcagatcaacgtgcaattacatggtccacgcgcctacctgcagtcgattcacggctccgtccatgccgtcgcacaggaacagcaaaagcaggctctcacctgcggtgacggcgcatttattcgtgacgaagctaacattaccctcgtcgccgatacgccgctgcgcgctttgctgatagatttaccggtgtaacaacggaagtgatggagtctgtcagtgagtaagaagaaaaacagaaaaaaggcgtcaccaacgccgttagccccggtgcaaccgcaagtcgccggggccgccagctttggttatgatgagatgcttagcgaactggaagccattgttgccgaagcggagatccgcctgcgggatgaagaaagtctcgcctgaaacggcaaaatggctgggttgattttcattaatggcctgaagaagatatcggccccgcgaggggccgatggcattattcactcagcgcgtcggcaagatcttttttcacctgcgtgcgctgctccggcgtcagtaccttattcacctcaaaatagtacttcacgcggtaataacgcacctgctgatcaatcttgctgaaggccgccagctgatcgttgaccgctttttcatcccatttaccggaatgaattacgtttatcagagccccgtctttaatttcctgttgggaaatctgctggacattactctccaactgctgatgcaggcttttaattttcgcgacctgatcgttggtaagttttaagtgctgaacaataggatcctgcgccggtgctggcgccgccttaacgtctgcggcctgagccgtgatagagaaaccggtggtcaacagcgtggcaaaggcaatacgggttatcaatttcattttttttcctgaagtaaaggtggcagaaatagcggattattatttcccagggcgcagtgaataaatgtaaaaaatgatagccaaacattatatatccacagcactaatatacttcactaaaacatataaaatatgaatgctgtgttaatttatatatttgacgccctaacatcaccagtttttattttaatttcaacagcaggcaaaatatttgacagcggtgacttttcctttaatttaattagcgcatattacgttatccagcgcatcaaggatatcatttaaaaatagataaggagattgagatgttattacgttttcgcgtattaccgctggtttttgtcatctcgctgttaagcggctgcggcctggcttctaaagccttttattccgcgggagacaaattatttcaacccggagatgacgccgtcgcttcgatgcagacgtattcagtggctcagttcctgcagccgtttactctcaacccggcgaaggccagcagcgattatctgggtaaatgggtcaaggtacgcggggtgattgtcgacattcgtcggaagagcggtatcgccggcagctactattttatcgtgaccatgcgagatgaacagaataaaacggataaacgtcttacctttaattttggctcgcataacagcgcagacgtagaggctttaagcaacggcagcgtcgctacgatcgtcggccaggttcatcaggtgcaagattccacgatcccgacgctacagaatcctaaggtggttaaataacggtagctgaccgataagccgcgttcttttggtatagcgtcgtggacagtcattcatcctgtccccgctattcgaatagcaaagaccccgccggagcggggttttgacataaaaaggtgaaactgaccgataagccgccttcttttggtatagcgtcgtggacagtcattcatcctgtccccgcttattcgaatagcaaaaaccccgccgaagcggggttttgacataaaaaggtgaaactgaccgataagccgcgttcttttggtatagcgtcgtggacagtcattcatcctttctccgctattcgaatagcaaaaaccccgccggagcggggttttgacataaaaaggtgaaactgaccgataagccgggttctgtcgtggacagtcattcatctaggccagcaatcgctcactggctcaagcagcctacccgggttcagtacgggccgtaccttatgaacccctatttggccttgctccgggtggagtttaccgtgccgcggactgttaccagccgcgcggtgcgctcttaccgcaccctttcacccttacctgatcccgcttgcgcgggccatcggcggtttgctctctgttgcactggtcgtgggctgtgacaccccccaggcgttacctggcaccttgccctatggagcccggactttcctcccctccgcccgtctccccccgaaggaggacgacgacgaagcggcgactgtctggtcagcttcggcgcgcagtatagagggtttaccgcccgttgtcatccctcagtggtcatcccaacctgcagggtggcagcaatattacgcgacgcgcggtaaatattatcaaacgccccgcgaaatgcctcttccagcgtcgaaacggaagttaacacgctgaatacggcatcgataccgtgctggtgaaccacgccgacatcgtgagtcaggctgccagcaataccgatcaccggcttacggtatttcttcgccacccgtgccacccccaccggcaccttaccgtgaacagactggctatcgagccgcccttccccggtgaccaccagtgagcagtcatggatttgttcttccagcttcagcgcctcggtaacgatctcaatcccgctgcgcagctccgcattgagaaaggccatcagcgccgcgcccatgccgccggccgctcccgcgccagggatcgacttcacgtccacctgcagcgacgccttaatgacgtcggcataatgcgccagattacgatccagctcgacgatcatcgcctcggtcgcccctttctgtgggccaaagatccgcgacgccccacgctcgcccaccagcgggttggtaacatcgcaggccacgtgaatcatcctgtcacgtaagcgcggatcgatggcggaaagatcgatccggctcagactgccgaggttgcccccgccatggccgatctcttgtccctcggcgtcacagaggcgggcgcctagcgcctgcatcatacccgccccaccgtcgttggtcgcactaccgccgatgccgataatgatccgttccgcaccatgctccagcgcctgtaatattagctccccggtaccccgtgaagtggtgatgagcgggttacgtttgtcgggcggaacgagccccagaccgctggctgccgccatctcaataaacgcggtgacgccgtcgccggacatgccccagcaggccttcactctctcacccagcggacccgttacccacgcgaaatgttcctttccctgcgtggcggcaatcatggcttccaccgtcccctcgccgccgtcggcgacgggcagggaaacatactgtgcatcagggaaaatttcccgaaatcctttttctatcgcctgagctacctcgctggcagaaaggctttctttgtaagagtctggggcaatgacgattttcataattttgtagcctgacagcgccgcgcaaggcaagcataacagggcgcgcagggcgcccttcttgttagcgagtgacttccactttcgccagtttttcgtaatagcacgccagcgcgctatggtctgcagtaccgagaccgtccgcgcgcagcgcctgcatcatctccatcaccgccgccgtcagcggcagttgggcgcccacgccgtgtgaggtatccaacgcattggccagatctttaatatgcaggtcgatacggaaacccggtttgaagttacggtccatcaccatcggggctttcgcatccagcacggtactgcccgccagaccgccgcgaatagcctgataaaccagatccggattgacgccggctttagtcgccagggtcagcgcttcagacatcgccgcgatgttcagcgcgacaattacctggttagccagtttggtgacgttgcccgcgccaatatcgccggtatgcactacggagccggccatcgctttcatcagatcgtagtatttatcgaagatcgctttatcgccgccgaccatgaccgacagcgtgccgtcgatggctttcggttcgccgccgctcaccggcgcatccagcatatcaatacctttggctttcagcgcttcgctgatttcccgactcgccagcggcgcaatggagctcatatcgatcaccacggtgcccggtttcgccccttcaataatgccgttttcacccagcgccacctctttaacatgcggagagttcggcagcatggtgatgatcacctcgcactgttcggcaatcgctttcggcgtcgtcgcggtctcagcgccagcggcgatcacgtcggcaatcgcttccgggttacggtcagacaccaccagcgagtaacccgctttcagcaaatttttgctcatcggtttgcccataatgccaagaccgataaaacctactttgattgtcataatgttctctctcttcatcctggtgattattttttaaacgcgtcggcaagtttctgggttgcagaacggaagacgcccagatcgctgccaacggcgacgaaggtcgcgccccattccagatagcggcgcgcatcggcttccactggcgccagaatgccgcttggcttaccgtgcttcttcgcgctggcgaagatatgctggatagcgcgctgcacctcaggatgggcggcattgcccaaatggcctaaggcggcggccaggtcgctcgggccgacaaacacaccgtccacgccctcggtcgcggcaatcgcctcgacgttgtccactccggtctggctctcaatctgcaccagaatggaaatgttcttgttggactgggcgaagtagtccggcacggtgccaaacatattgccgcggtgggaaacggagaccccgcggatcccttccggcggataacgggtcgaagccaccgcctgcgccgcctgttcagccgtctcgacaaacggcaccaggaagttatagaagccgatgtccagcatgcgcttgatgatgatgggttcattggtcggcacacggactacctgcgcgctggagctacctttcagggccatcagctgcggaatgagcgtggtgacgtcgtttggcgcgtgttccgcgtccagcaccagccagtcgaaccccgccagacccagcacctcggtgctaatcgggttagccaaagcgcaccagcagccaatctgcacctgatgcgccgccagcgcggccttaaatttgttcggaaaaattgcgttatccatgatttttaccttgcgttaatcgttgcttacttctgcaattccatacgtttgatatcgccaaccacaaacaggtagcagaccatcatcatcagcgcggagccgccaacaaaaatcagtgcgccattaaatgagtgcagttcgctcacgatatagccaataaccagcggcgtggcgatcgaggccacattgccaaagacgttgaataccccgccgcacaggccaacaatctccttcggcgcgacatccgagataaccggccagcccagcgcgccaaagcctttgccaaagaacgccagcgccatcagcgtaatgaccagcggcgtgctggccgtgtagttacacaggatgatggacgacgccagcagcattcccagcacaatgggcagcttacgcgcaaaagtcagcgtgcagccgcggccaatcagataatccgaaaacagcccgcccagtacgccgccagcaaagccaaacagcgccggaatcgaagccacaaaccccactttcagaatcgacattcccttgtcctgcacgaggtagatcggaaaccacgtcaggaagaaccatgtaatggtattcaggaaatactgaccgaaaaatacgcctaacatcattcggttagtcagcaactggcggatatagtccatcttcggcccggccgccggggtggcctcttttttatggtccatatcgaccactgcgccgccttctgagatatatttcagctccgcggcggacattcgcggatgatcggtggggttatgcacaaacttcacccagatgatggtgagcacaaaccctattatccccatcacggtaaagacatgttcccagcccagcgcgaaggtcagccagccgagcagcggcgagaacagagccagcgagaagtactgagcggcattaaagatagctgaagccgtaccccgctctttggccggaaaccaggccgccacaatgcgggcgttggcgggaaacgagggcgcttcggaaaagcccagcataaaacgcatgaagaacatggagaccccggcccaggcgagcgggaacacatcaataaagccttgcaggaaggtaaacagtgaccagaaaaacagactgtatgaataaacctttttcgagccaaatttatccagcagccagccgccagggatctgcatcagcagataagcccagccgaaggcggaaaaaatgtatcccatcgacaccgcgctgagccccagctctttcgcgacttcagtaccggcgatagacaaggtcgcgcggtcgccatagttcactgccgtcaccacaaatatcatcaacagaattaaatagcgggtcggtattccttttttttcatctaatgtagaatccaaaatcatttagacattcctcgggcacagaacaccttttataattgttttaagtggtttctgatttatttaaaagacgatattgaaattgtctattcgcatatcgatcacctcaaaaacatgactcagtataatcagcacgcccccgccagacactatgcatacccacaatataaagttattatttaaatccataattgtgcttatgccataagtcatgggcgctaatccacacttcttacgattgcctgccctgcagaggttagcgtcataaaaaggagtgatgccgatcacattttaaaatcaactcagctgacatcctttattccatcatactgatacgtagcaaatgaattagcgttttattttattattagcacctgtttggagatgactggacaatggctgacattgcaattcgacaacaatcgccgaccgcgttttatattaaagttgacccgacagataatgtggcgattattgtcaacgatcgcggcttaaccgccggaacgcgtttcccggacggcctgacgctcgtcgagcatatcccgcagggtcacaaagttgccctggtggatatccccgcccatggtgaaatcatccgctacggcgaagtcattggctatgccgtacgcgatatcccgcagggaagctggattgacgagtcgctggtggagctgcccaccgccccgccgctgaataccctgccgctggccactaaagtgcctgaaccgctaccgccgctggaaggttacaccttcgaaggctaccgcaatgctgacggcagcgtgggtaccaagaatctgctgggtattaccaccagcgtgcactgcgtcgctggcgtggtcgattacgtggtgaaaatcattgaacgcgacctgctgccaaactatcccaacgtcgatggcgtggtgggcctgaatcatctctacggctgcggcgtggcaattaatgcgccggcggcggtagtgccgattcgcaccattcataatatcgccctcaacccaaacttcggcggcgaggtgatggtcattggcctcggctgtgagaagctgcagccggaacgcctgctgcagggcacggaagacgtcaaaagtatcccggtggacagcgccagcatcgtcagcctgcaggatgaaaagcatgttggttttaaatcgatggtcgatgacattctgcaggtcgccgagcgccacctggcgaaactgaaccagcgccagcgggaaacctgcccggcctctgagctggtggtcgggatgcagtgcggcggcagcgacgccttttcaggcgtgaccgccaacccggcggtaggttacgcgtccgacctgctggtgcgctgcggggcgacggtgatgttctcggaagtgaccgaagtacgcgacgccattcatctgttgaccccgcgggcgattaacgaagaggtcggtaaacgtctgctggaagagatggcctggtacgataactatcttgatatgggcaaaaccgaccgcagcgctaacccctcccccggcaacaagaaaggcggtctggccaacgtggtggaaaaagcgctggggtcgattgccaaatcagggaaaagcgccatcgttgaggtgctctctccggggcagcgtccgaccaaacgcggcctcatttacgccgcaacccccgccagcgattttgtctgcggcacccagcaggtagcctctggcatcacggtgcaggtattcaccaccggtcgcggtacgccgtacggactgatggcggtaccggtgataaaaatggcgacccgtaccgagctggccaaccgctggtatgacttaatggacattaacgccgggaccatcgccactggcgaagagacgattgaggatgtcgggcggaagctgttcgaatttattctcgacgtcgccagcggacgcaaaaaaaccttctccgatcaatggggcctgcacaaccagctggcggtatttaacccggcgccggtaacctgatcgagagcgtaaggatttaaccacttttagcccggatctatccgggcttgttggttagggatgctgggcggcaagaaaagcgctgatctccgcctgcgtcgaggtgccttccatggggccgcgttggctaatcgccagcgagccgctggcgtttgcccatctcagcgcctcccggggcgtggcgccattgaggaacagactaacaaaggtggcgccaaagcaatccccggcaccagtcggatccaccaccggcacgctgaagccggcgacatggtgcgtctcgttggcgctaaagtagcttgcgccacgcggcccgcgtttaatcaccacatgcttcacgccgcgtttcagtagcttatcaaccaggacctgctcattgcgttccggattgagaccaaagtaatccagctcgccatcgctcggcaggaagatatcggtgtagtcgagaatatattcaaaggcctgcgacatctccgggatgttcagcatctctttgcgaatatttgggtcgaacgatactgtgccgctgcggcctttaatgttttcaatcgctttacgcatcgcatcgataatacggaacgagaatagcgatgaccccataatatgaaaatgctgacactgatttagcaacgcttcgtcaatgtggtcggcagtcagcagaccgcaggcgctgttaggcatattaaaaataaaatcgcgctgcgcctggctacgatagctgacgaaggcgctaccggtagtcgctttctgcagcatagcgatgccgttgacgttgacgccgtctttctccagccgcgcaatattcatctcgccaaatgcgtcgttgcccacacagctaaacaacacggagccgaaacccagctttgccacctgatcggcaaatattgccggcgccccgctgggatagggcccccaaaattcaccgggacgggaaaacccctgattctcttccttggcgagaaactccaccagcagctcgccgatggtgcaaatggttacgttcatcaccgctcctggtttgtcttatgcaaagccgtgttgagccatgtcaggcattcattgttggtatagctgttggtcaaacccgcggcgaggaagcaggcatggtactctgccgcgacgacctgaggggtcacgacgctgctgatctgctgtaattcacccacagcataacgtttctcgccatataccggccgggaagcgacaatcgcaatgactcgtttactctgggccaccgcttcgcttaacaaatgtgccgtaacctcgttacgcacgcttagcgtgccgtcttcagcaatgtgatccaccgctatcagcgcacgtgaagggcggtaatgacccaacgccttcagcgccagttcgccctccacaatccgcccctgaccggacaacaccccgccaagcagaacggtttccccatttaaaaactcctgcgccagcgcgacgtggcccagatcatttaatagcaggcaaagctcttctctgttggccagaaaggggatcactttacgcaaaatggaaccctggcctagaaacagcgtttcgccattttctatctgcgccgccacctggcgagccatttccgtctccagcgctttatctctgacggcaggcgcttctcgggtcatcgcaaccggcgcgccagcctgggcggtataaatcgccccgccaaaagagcgtttcaagtagccctgctgctcgaggtagttgagatcgttacggattgtcaccccggaaacagccagcatttctgccagatcgtcgactttgatctcgccgttcttacgaacgatctctgcgatgtccaagcgccttttcagcaagctggttgacggttttgccacggtttatgccttattattttctcctggaataactttcatttttaaatttccctcttgcaatgtcaaaccgcggctgtagccctatcccgccatcaatcagcaaatcgatattaatcatgtagttacaaattggcaccttaccaacttaaactttaaaaaagaaaccttagaaatactattaactttcattttaaaaagcaattcatcattgtgtgcggtggatcacacctaaaggcgagacgatcgttacattactttcaaactgaaggttattaaacagaaataacttacaagatgaaaacagaggactaaaatgtacatcatttccagtaaaaacatgctattaaaagctcagcgacagagttatgccgtgccggctttcaatatccataacctcgaaaccatgcaggtcgttgttgaaacggcggctgagttgcgctcccccttgatccttgccggcacccccggtacctacagctatgccggcaccggcaacgtagtggcgatcgcccgcgatctggcaaaaaagtgggatctcccgctcgccctgcacctcgatcatcacgaggatctggctgatatcacgcgcaaagtgcaggcagggatccgctcggtcatgatcgatggctctcactcaccgttcgaggagaatgtggcactggtaaaaagcgtggtggagttgagccaccgctatgatgccagcgttgaagccgagctaggccgtctgggcggagttgaagacgatctggtggtcgatgctaaagatgcgctctataccaaccccgaacaggcccgcgaatttgtcgctcgtaccggtattgattcgctggccgtcgccatcggtaccgcgcacggcctttacaccgccgaaccgaagcttgattttgagcgcctggcggctattcgcgactgcgttgacgttccgctggttctgcatggtgcttccggcctgccggatagtgatattcgtcgcgccatttctctgggcgtatgcaaagtcaacgtcgccaccgaactaaaaatcgctttctcggatgcgctgaaagcctacttcctggaaaatccgggcgccaacgatcctcgtcactatatgaaaccggcgaaagcggcaatgaaagaggtcgttcgcaaagtcattcacgtttgtggctgcgaaggacaactgtaatcagcggatcgaaggagccttgttgtgatccacaccctgacactgaataccgcgatcgatatgaatatcttttgcgatccgctccagccggcggcagtcaaccgcacccggcaaacggaatattgcccgaatggtaaaggggttaacgtctcgctggtattacatcattaccagcagccaacccatgtcatgggcatattcggcggttttaccggccgctatatcgttgaggaactacgcaaacagcatattaatgtcacaccggcatgggtcgctgaaccgacccgtataaatatatttattaacgacggcagcgatgaatacaaactggtaaatcccggcgcgcggattgacgatgaaggaaaagaacaaattcttcaccatttacagtgcgtcgcgcccggtgattatttagttatcagcggcagtctgccaccgggaatagagagccggttctatagcgagattctggtgctgtgccagcagaaagggtgtgaagtcatcttagatatcagccacccggtgctgcgccagctgttagagtggcgtccactattgattaaacccaatgacgacgagctgaaagagatctttggtctggatgtcagcagcccccggcgggtacgcgaagcaatgcaaacgctccaccagctcggggctcgcaatgttctgctgacccttggcgcgcaagggctctatttttcgaacggcgcgcaactgtggttctgctcggcaccgaaaatcgaactggtcagctcggcctgcgccggcgatgccgcgctgggtgcattcctcagccattggcttaacacagacgatattccccaggccctggcgctggccagcgccaccggcgctgatgtggccgcctccgccgggctgggtaaattaaaccgtacgcaagaattattacaacaacttcagatcgtccaattataaaggtccgattatgaaaaagattattgccgtgaccggctgccctacaggtattgctcatacatttatggctgaagaggccttaaaaaccgcagcgaaaaaattaaacgttgaaataaaagtcgaaaccaatggcgcttccggcgtagaaaacgccattacgccggaagacctgaaggatatttatggcgtgattattgctgccgataaagatgttaatgccgaacgttttaatggtttaccggttattgaggtgccggttaaagaagccattcaccatccggcggaattaattaataaagtcgttaacggtcaggcgccgcgtcgtcagggattctccgcggcaacggatccagacgagaaatatgagcgagaatcgttcggccgacagatttacaaacatctgatgagcggcgtttccaacatgctaccgttcgttgtcgccggcgggatcttaatcgctgtttctttcttatggggcatctactccgccgacccgaattcaccgcagtataacgtgattgccgccacgctgatgaaagtcggtcagcaggcgttctcgatcatggtgccggtgtttaccgcctacattgcctggtcgatatctggccgccctggcatggttgccggttttgtcggcggtctgctggcgaacgccaccggcgccggattcctcggtgggatcatcgccggttttgccgccgggtattttatgctgctgatccgtcatctgctcgacggtctgccgcgccagtacgaagggctgaagtcgatctttattatgccgctgataggcgtcctggtgatcggcgtgatgatggtcctgctcggccagccggtggcagcgatcaacaatggcatgatgaactggctcagctctttacaggaagccaacccgatcctgctggggatcgtggtaggcgcaatgtgctccttcgacttcggcgggccggtcaacaaagcggcctatgtcaccggtacgttgctgctgggtcaaggtaactacttttttatggccggtgtatctgccgcctgcatcacgccgccgctggtcatcgctctggcgaccacgttctttccgaaaggctttagcgaggaggaacgcgccgccgggatggtcaactatatcctcggctgtacgcacattaccgaaggtgcgattccctttgccgccaaggatccgctgcgggtgatcccgatgatgatgatcgcctcctcaatttctgcggtactcagctacagcctgcatattcaggttccggcaccgcacggcggcttcttaatcctgccgctggtcagtaaaccgttgatgtgggtgctgtgcattctcgccggttccgcctgcggggcacttatgctgggatgctggcggctgtggcaaaaacgcactgacaaagcgacagctcttgctggcgccatgaaataaggagcaagctatgcaactaacttctgccgatatttgtttcgatcgtcaggtcaaaacgaaagacgaggcgctacagcgtgtcgttgcagccctgacccatgccggacatacgcgggcagactatctacaaggcatgcgcgagcgcgaggggcaaatcagcacctatctgggcaacggcattgccattccccacggtacgccgcacagtcgcgacgcagtgcttaaaacgggcgttaaggtgctggcttgtccgcagggggttgactggggtgaggagcaaaccgcctatctgattgtcggtatcgcggctcaggacaatgagcatctcgatattttgcgccagctcacccatgctctgggcgatgatcgagtacctgaggcgctgacgcgcgctgataccccccaggcggtgctggaaattctcgccggcgacattcctctgccagcaggcgaagaaccacaacccgcgccgcaatttgacgaagaggccacctttaccctgcgtaatccgcacgggctacatgcccgtcccagcgcggtgctggtgaaagccgtcaagcagtggcgatcgcaaatccgggtcgaaaaccttgatacgcgctccgccattgttgatgccaagaatctgatgcgcgtcgtatcgctgggcgccaaacagggtcatcgtctgcactttatggccagcggcaacgatgcgcagcaggcgttaaaagccattggtgacgcttttaacgccggtctcggcgaaattgccgcccagccgcagcaggtctcccaggaagccgtcaaaacgaaacgcagctggctatcccgaatatttagttaattttcaatcaattaaaaacgccctgtcttcctggtcagggcgtttttgtctcgaaagacgatacctttcactgcgttacaacactatttatcgatgcagatcacaaatcaaaacaaagccatttgcgaccaaaacaaaacataacgaatatattcgaaagaaaacggaggttgtaaatgaaagacattatcactcgccataagtcaggcgaacatatcggcatctgttcagtatgttcggcgcatccgctggttatcgaagcggcgttacgtttcgacctgtcgaccaacaataaggtgctgatcgaagcgacgtccaaccaggtgaatcagtttggtggctacaccggcatgcagccggccgatttccgcgacttcgtctacaacatcgcgcgtaccgtcggttttccggcggagcgcattattcttggcggcgaccatcttggaccgaactgctggcaagacgaaccggccgccgtggcgatggaaaaatcaatcgacctgatcaaagcctacgtcgccgccggctttagtaaaatccatctcgatgcatcaatgtcctgtgctgacgatccggtgccgctggatcctggtgtggttgctgagcgcgccgctcgcctgtgtcaggctgccgaggagaccgccagcgatgagcaaaagcgccacctgacctacgtcatcgggaccgaagttccggttcccggcggcgaggccagcaccatcggcagcgtacatgtcacccgggcgcaggatgccgccgcgacgctcgaaacccatgaagccgccttccgtaagctggggctcgacgccgcgctggagcgagttatcgccatcgtcgtgcagcccggcgtggagttcgaccatacgcaaatcattcattaccagccgcaggaagcgaaagcgctctccgcctggatcgaaagcaccccgatggtctacgaagcgcactctaccgactaccaaacccgccaggcttatcgtgcgctggtccgcgaccacttcgccattctgaaagtcggcccggcgctcacctttgccctgcgtgaagccatctttgccctcgcccaaatggaaaatgagctgatcgccccggagtctcgcagtcgcgtgatggaggtgatcgacgaagtgatgcttaacgaacccggctactggaaaaaatactatcgccccacctggagccaggcgatggtcgatatccacttcagcctttccgaccgtatccgttattactggccgcatccgcgtattcgccaaagcgttgagaaacttatcgctaatctgaccgacgctaagctaccgctggggcttatcagccagtatatgccggtgcagtttgaacgactgtcgctgaatgaactgaacgccgagccgcacgcgctgatcctcgacaaaatccaggatgtcctgcgtgcctatcgctacggctgttcttctgaaaccgcgtgaagttaagaggatatatgagtcaactgtttgttcgtaccggcattcatttcagttccagtcagcaggcactggaacacattggcgcagagatgctggcgcgaggcgtcgtacatgacagctatcccgccgccctgctcgaacgcgaagcgacttttcccaccggcatcgccctggagaagcatgctgtcgctatcccgcactgcgaagcgatccacgcgaaatcaccggccatttacctgatacgtccggacatgccggtctcttttcagcgcgctgacgacgacggcgaaatcgacgtttcgctcatcatcgcgctgattgttgaaaacccggcggcacagctgaagctgctgcgccggttatttagtgagctacaaaatccgcacacgctggaggcactgctcgccgcttccgacgatcggctgccggtgcggttccagcaattaatccttgagcccgagcttagcgccgtggcttcataagatactgataataaaaggggtaccctatgaaacgtaaagttatcgtcgcctgcggcggtgccgtcgccacctccacgatggcggcagaagagattaaagagctgtgtgcagaccacaatattgaactggatttggtgcagtgccgggtcaatgaaatcgaaacctacatggacggggcggacctgatctgcaccaccgcgcgcgtggagcggaccttcggcgacattccggtggtgcacggcatgccattcgtctcgggcgtcggcattgaagccttacaacagaaaatcctcggcatcctcgcggagtaaatgccatgtttagcgaaatcatgcgttatatcctcgatctcggtccgacggtgatgctgccgatcgtgatcattatcttctccaaattactggggatgaagctcggggattgttttaaatcaggtctacatatcgggatcgggtttgtcggcatcgggctggtcattggcctgatgctcgactccatcggcccggcggcaaaggcgatggcggagcatttccagattaatcttcacgtgatagacattggttggccgggttcatcaccgatgacctgggcgtcgcaaatcgccctggtggcgatcccggtggccatcgcggtcaatatcgtgatgctggttacccgtatgacccgcgtggtgaatgttgatatctggaacatctggcatatgacctttaccggcgcaatgctgcatatcgcgaccgggtcgtactggataggtattctcggcgtggtggtgcatgctgcttttgtgtataagctgggcgattggtttgccaaagatacccgcgatttcttcggcctcgagggtattgcgatcccgcacggcagttcggcgtatttagggccggttgccgtcctcgtggataccatcatcgacaagatccccggtcttaaccgtattcactttagcgccgatgacattcagaaacgcttcggccccttcggtgaaccggttaccgttggcttcgtcatggggctggtgattggcgcgctggcgggttacgacctgaagggcattcttcagctggcggtgaaaaccgcagcggtgatgctgctgatgccccgggtgatcaaaccgattatggatggcctcaccccgatagccaaacaggcgcgtaaacgtctgcaggctaaattcggcggccaggaattcctgattggtctcgatccggcgctgctgctcggtcatacctcggtagtctcggccagcctgattttcatcccgctgaccattcttatcgccgtcgtggtccctggcaaccaggttctgccatttggtgacctggccaccatcggcttcttcgtagcgatggcagtggctgtacatcagggcaatctgttccgcacgttgatttccggggtcatcattatgggaatcaccctgtggatcgccacccagaccattggcctgcacacccagctggcggcaaacgccggggccctgaaagccggcggcatggtggcctcaatggaccagggtggttcgccgattacctggctgctgatccagctctttacctggcaaaatgtggttggcttcgcggtcatcggcatcatctatctggccggcgttctactgacctggcgtcgcgctcgcggcttcatcgccgcggaaaaagcagaaaaaagcgctgccccgcaacaaagtacaggcatgtcttgatctaaaaggggagcgttcgctcccctgaatcttatagctggagaatgttatgaaatcagtggtaatccatgctgaggggaacgtctgcgttgaagaacgccctatccccacgctgcaaacggaaaacgatgtcctggtcaaagtggtcagttccgggttatgcggctccgatatcccgcgcattttcgccaaaggggcgcattactaccctattacgctggggcacgaattcagcggttatgtggaatcctacggcgcggcggtaaccgacctgcagcccggcgatgccgtcgcctgcgtgccgctgctgccttgcttccagtgcccgcaatgccagcgcgagtatttctctttatgtaaacagtatcagttcgtcggctcacgcagcgaaggcggcaacgccgaatatgtggtggtaaagcgcgccaacctgttccgcctgccggaccagatgccaattgatgatggcgcgtttatcgaaccgataaccgttggcctgcacgcttttcatctggcgcagcgctgtgaaggtaaaaacgtgattattatcggcgccggcaccatcggcctgctggcgctacagtgcgcccgcgaactgggcgccaacagcgtcacggcgatcgatatcaatccgcagaagctggagctggccaaaaccctcggcgcaacccatgtgttcaacagtcgcgagatgagcggccaggcgattcagcaggcgctggaatccattcagttcgaccagttagtcctcgagaccgccggtacgccgcagaccgtcgcgctggcgattgaggccgccggtccgcgggcgcagctggcgttggttggcacgcttcatcacgatttaaccctcctggcagccaccttcgggcagattctgcgtaaggagttgaatattgtgggtagctggatgaactactctggcccgtggccgggagaagagtggcaaacggccacccgtctgctgactgaaaaacgcctgcagctggcgccgctgatcgcccatcgtggcgacgcagaaagcttcgctcgtgcagtgcaggcgctcaacggcgcgccaatgcaaggcaaaatcctgctcaaactctcttgaccgcccgagccagccatcagcgctggctcatccaacctttcgaaaattatcgttcacctttcgttacccttcgattacactgagatgagttaattatcaggcaaatcaagatgaactcatttgaacgaaggaacaaaattgtcgatatggtgaatacgcagggtagcgtattggttctagacctttcgaatctctttggcatctctgaggtaacgatccgcgccgatctccgcttactggaagaaaaaggactgttaacccgttttcacggcggcgccgcccgtgcgggtagcgacctgaccgacgccgagaatcaggaagtggtgcttgaagaccgctatcagcttgccagcgatcccaaaaagcgcatcgcccatgccgcggcagcgatgatccgtgaaggtatgacggtgatcctcgatagcggtagcaccactcttcttatcgccgaagcattagtacggatgaccaatatcaccgtcatcaccaacagcctgcccgccgcgtttactctggcagaaaataaagatatcaccctggtggtgtgcggcggtaccgtgcggcacaaaacgcattcgatgcacggcacgattgccgaacgttcgctgcaaggtatttgcgccgatttgatgtttgtcggcgccgacggtatcgacgccaccaatggcatcaccacctttaacgaaggctactccatcagcagcgtgatggccgccgccgcgcatcaggtgatcgccgtgctcgacgccagcaaattcaatcgccggggctttaaccaggtactgccgatggaaaagatagactgcgtgatcaccgacgacggcattagtgaaaatgaccgtgcagcgttaagcagcaaaaaggtggaactgaagatagtgtaattgcacgctgagtggaacatcatggcggctggttctacttaaccagccagcttccaccttttttggcgcctatgcgaatcaatctccctttcgcctgtagcccttgcagatgacgctcaaccgtacgtgctgatatccccaagatctccgccagcgctctcgccgttaattccggcttttcggttagcaaacgcaaaattgcgttttccggtggggctaatttgacgtcgatttcttccgacatttcttccgacatttcttccgacacgatgaatgaagtttccagaccttctttcagcgccgccaggatattttgcaacatccaggtcacgaatagcgtgcaatcactggttttatcacaagcacctaaaatgtcgtaataacgttcttgctgatggtggatcagcgtttcaaccggcagccaggccaattcctgacgccactggcttagaatcaacgtctgccataaacgccccatccgaccattgccatcagcgaaagggtgaatgaactcaaactcgtagtgaaaaactgaactggcaattaaaggatgtagctcggtgtgttccagccaactgagtaaatcagcgatcaatcttgggacctgggcagcaggcggagccatatgtatcacctgcgtaccgcgataaatgccgacgtttccgccacgtaaagcgcctggacgatcaaccagcccggtcatcagcgttttatgcgccgtcagaagatcgctaatgtttgccgcatgccatccgggcattaattcataagcacgaatggcatttctcacttcctgaatatccttagccggcgccagaacccgtttgccttccagcagcgccgttacctgttccatgctcaggctattatgttcaatcgcgagtgacgcctgaatagtacgaatgcggttttctttacgcagcaacggcgatgcttctccacgtttcgccgaccaatgcccaagcaattccccaatctcaacgacaaggttgaggaccgagggtgtgatgctaaacggcggttggtaacgactcatcgtttactccccctgctgctccagggcgtacttatacaacgcatttttcttcacgccgtggatttccgcggccagcgcggcggctttcttcagcggcagctccgcctgcagcagcgccagagtacgcagcgcggccgccggcagcgcctcttcctgagccttgaaaccttcgacgatcagcaccatctcgcctttacgacggttttcatcttccttcacccacgccaccagctcaccaatcggcgcgccatggatcgactcccaggttttggtcagctcacgagccagcaccacatagcgggattctcccagtaccgcgcagatatcctccagactctccaccagacggtgggtcgactcatagaagataagggtgcgcggctcttcttccagcgctttcagggtatcgcggcggcctttcgatttcgccggcaggaagccttcataacagaaacggtcggaaggcaggccggcggcgctcagggcggcgatagccgcacaggggcccggcagcggcaccacgcgaatattcgcttcgcgacaggtgcgcaccagatggtaaccaggatcgttaatcagcggcgtgccggcatcggaaaccagcgcgatgttttgcccttctttcagtttggcaagcagggtttccgccttttgctgctcattatggtcgtgaagcgcaaacaaacgggcgtttatcgcaaaatgttgcagcagcaaaccggtatgacgggtatcttccgctgcaattaaatcaacagcttgcagcacttccagtgcacgctgcgtgatatcagacagatttcctatcggagtgggcacaatatagagctgcccctgagaattatccgctgattcgtgttgtttcattgtctcgtccgtattgccgatttaatattgagcattgagccaaaaaaatatcactggacacttatggtaccgtcaacatttcttcgttctaagcccgcgcgctgcctgcccatattgctggcgactcttatttttgctggctgcggcacccacacgcaggatcaaagcgcggcgtttatgcagggtacgtcgcaggccaactccagtttctacttacagcagatgcagcaaagcacgaatgatagcaagaccaactggcaattactcgccattcgtgcactactgcaggaagggaagaagcagcaggctatcgacctgtttaaccagctgccggcgaacctgaacagcactcaggcccgtgaacagtcgctgctggcggtggaagtgaagctggcgcagaacgattatcaggccgcccgtaatctgctggctaagatcgatccgacaaaccttgagcagcctcagcaggcgcgctactggcaggcgcaaatcgatgccagccagggtaaaccatcgctgaccctgctgcgcgccttaatcgcccagcagccgctgctgagtgacgccaaacagcgtcagaaaaatattgatgcgacctggcaagcgctcacctcgatgccccaggaccaggccaatgcgctggtgatcaacgccgatgaaaatatcctccagggctggctggatctgcagcggatgtggtttgacaaccgcaacgatccgacgctactgaaagcgggcgttaaagactggcagacgcgctatccgcaaaacccgggcgctaaaatgctgccgacggcgcttgtgaatatgcaaaactataagcccgcgtccatcaacaagattgcgctttttctgccgctaaacggtcaggcgtcgatcttcggccgcactatccagcagggctttgaagccgccaaaaacggcgcgccgtcggtgacgggcagcgcggttcccgcccaggtcgcccaggtcgcccaggcggcgaatgtgtccggtaatgatgatgtggtgagtccgtcgcaggcagaaatcagcgatcttaccgccgccggaagccgcgctgatccggttcaggccccgacgcaggaccaggcagcgcctgctgcggaaccggcagcccaggcgccggcaacatccgccacgccgcagactaccgcttccccggccacccagccggttaccgcgccggccgcacagccgcagcccgtggtcgcaaccgccgccaacccttctgcggaactgaaaatttacgacaccaccagccagccgataagccagctgctcgcccaggcgcagcaggatggcgccaccctggtggttgggccgttgctgaaagaaaacgttgaagaggttatcaagagcaacacgccgctcaatgtgctggccctcaaccagccggaaaaagtcgaaagccgcgctaacctctgctatttcgcgctttctccggaagacgaagcgcgtgacgccgcccgacatatccaccaacaggggaaacagaccccgctgctgctggttccgcgcggcgcgctgggcgatcgtgtggttagcgcttttgccgacgagtggctgaagctgggcggcgccagcgtcctgcagcagcgttttggatccacggccgagctgcgcgccggtgtgaacggcggcgggggcattgcgctgagcggcaccccggtctccaccctgccatcagcgcagaatagcatcctcggcagtgcggatgagatgccggtaagcagcggcggcagcgtcgatgcggcctatatcctcgccaccccggaacagattgcctatatcaaaccgatgatcgccatgcgcaacggcagccagagcaatgtcaccctgtacgccagctcgcgcagcgcccagggcaccgcggggccggatttccgtctggagatggaaggcttgcagtatagtgagatcccaatgctggccggcagcaatccgtcgctaatgcagcaagcgctgtccgcggtgcgtaatgactactcgctggcgcgcctgtatgccatgggcgctgacgcctggtcactggcaaatcacttcacgcaaatgagccagacgcctggcttcgagctgaacggcaataccggcgatctgacggccaaccaggattgcgtgattaacaggaaactgtcatggctcaagtaccagcagggaaaaatcgttccggccagctaagcaaacagaccggtgatgcctgggaaaaccaggctcgccgctggctggaaggccagggcctgcgttttatcgccgccaatgcccgcgagcgtggcggcgaaattgaccttatcatgcgcgacggcacggtcaccgtttttatcgaagtgcgctaccgccgtagcgcccggtacggtgatgcggcagccagcgtcactccgcaaaaacaacaacgactgcttaaagccgcccgtttgtggctctgccgacagaatgggagctttgagactgtggattgccgtttcgatgtggtagccttcaccggaaacgacatccaatggctaaaaaacgcctttggcgaatagcgtaataccagaagtaagggatcccgtgctcgacagaatcaaagcctgctttaccgaaagcattcaaacccaaattgccgcagcggaagcactcccggacgccatctcccgggcggcgatgacgctcgtccagtccctgcttaacggcaacaaaatcctctgttgtggtaatggcacctccgccgccaacgcacagcattttgctgccagcatgattaatcgctttgaaacggaacgccctggtttacctgccattgcactaaataccgataatgtggtcttaaccgccatcgctaacgatcgcttgcatgacgagatctacgccaagcaggtgcgcgccctgggacacgccggcgatgtgctgctggcgatctctacgcgcggaaacagtcgggacatcgtcaaggcggtggaagccgccgtgacccgcgacatgaccatcgtcgcgttaaccggctatgacggcggtgagctggcgggcctgttaggtcaacaggatgtcgaaatccgcatcccctcccatcgcagcgcgcgtatccaggagatgcacatgctgaccgtcaactgtctgtgcgatttgatagataacactctttttccacaccaggacgattaaggagaacacatgaaggctctctcgcccctcgccatcctgctttctgcactactgctgcagggctgcgttgccgccgcggtagtcggaacggcagcagtcggcaccaaagccgcaacggacccgcgtacggtgggaacccaggtcgatgacagtaccctggaactgcgcgtcaatagcgccttgtcgaaagatgaacagattaagaaacaggcccgtatcaacgtcaccgcttatcagggcaaagtcctgctgaccggccagtcgccgacgccggacctctccgcgcgcgccaagcaaatcgccatgggcgtggaagggaccacggaagtgtttaatgaagtgcgccagggccagccgattggtttaggcaccgcctcgtctgatacctggattaccaccaaggtgcgttcgcagctcctgagcaccgatcaggtcaaatcctcgaacgtgaaagtaaccacggaaaacagcgaagtcttcctgatggggctggtgaccgaccgcgaaggccgggcggcggcggatattgccagccgggtaagcggcgtatcccgggtgaccaccgcctttacctacattaaataaagctgcagtttcccggctggcgctgcgcttagccgggctaccgccccctgtacgttgtgtgccgggtaaggcgtagccgccacccggcatccaatccggctatgcgtacgtttacggcaaactacaccagcgccagcgcaccgacaatcgccccgcacagcgccaccagtccgcccgtcagccacagcgctttggctgggaaggctttacgcagcataatcagcgacggcacgctcactgccggcagtgtgatgagcagcgccagcgcgggcgccgtccccatacccgccagcatcattgtctgcacaatcggaatttccgccgcggtagggatcacaaacaggcagccggcgatcgccatcgcgataacccagaacaacgtattatccaccacgccatcggcgtgcgggaacagccagacgcgcgccgctcccagcaccagcaccgcgaggatataaaccgggatcgtgttccagaacagcgtccacagcgcccgcagccagcgactaaagaagccgccctggctcgcctccgcctgtacatctggcaccgctaccggctgcgtcgccgcctctttcacccatttctgcaccagcgtcgccacagttaatactgtcgccagacccgccaccaggcgaaccagcgcaaactgccagcccagaacaaaacccataaacaccagcgtcgccggattgagcagcgggttccccatccagaacgccagcgcccccccatcgacacctgctgtttgcgcatcccggccgtgaccggcgcggcgcagcaggtgcacatcatgccgggcagcgagaaaatcgctcccagcagcgtgccctgaaaccgcgattgtccaagggtgcgtagcagccagtcgcgcggaatgagaacctgaatcaatgacccgagcagcacgccgagcaccgccgctttccagacggcaaggaagtaaaccatcgcatagtcccacgccgccatcagcgggttagcgtcggcctgggcgagaatagatttaccgatactgtgggtttccgcagcggtgaaggctttcccgtagtacggctgccatttgacgtaccacagaccaacaatcacgacgagaaagaaaagcgcgggtttccaccattgaaatggtgacgccgcctgagatgaagactgaccagccatagcattccccagcaagaaatgtggatatgaattgaagccgtgaatactacgccggaagcctgcgtttgcaaaccgctattcagcctgccgcgcggcgcgctcccgtagttccgatgatgtcagaattcgcaccccttcgtgggtgggcgacagcgcctccgccagcagggcgatcgccacatcgcgggccgcaatggatttccagttccccggcaagagccggaacaatggtgcgaggaaggtctcattggcccgctttttttcccgctcgcctgacagcatcgacggcctggcgatggtcagccgcggccagtcttgctcaatcagcgccgcctccatttctcccttcacccgattgtagaaaaacggcgagtgggcgttggcgcccatcgcgctaaccaccagcatatgttgcgcacccagtcgtttgccggtcagcgcggtatcaaccaccagcgtgtagtcagcatggacgaaggcctctttgctcccggcctcccggcgcgtcgttcccaggcaacagaagacgatatccaccgggtcaaccacctgcgccagggcatcggtcagctggggatcgtgaggattaaagacaccttccgctggcgccagcgggcgacgcgtcggcgcggcgatggtgcttatacggggctcattctgcagcagccggagtaagtgaccgccaactaacccggtcgcgccggttaataatacctgactcattggttctcctttacagaattctccgccttgcactttcaggctcatgttccaggcttaataccttacaaggtaagtatccaccatcatcatggaattacctcattgaccatccagacagtggaggaagcatgagtaaaaagatagccgtcctcattaccgacgactttgaagattctgaatttacctctcccgccgaagcctttaagctcgccgggcatcaggtcatcacgatcgaaaagcaggctggcaaaacggtgaagggtaagcagggagaagccgaggtcgccatcgacagagccatcgatgacgtcacaccgggtgaatttgatgccttattgctgcccgggggctactctcccgaccagctgcgtggtgatgaacgcttcgtcacctttacccgcgattttgtcaacggcggtaagccggtgtttgccatctgccacggtccgcagctgctgatcagcgccgatgtgatccgcggacgtaagctcacggcggtgaaaccgattgtggtggatgtgaaaaacgccgggggcgagttttacgaccaggaggtggtggtcgataacgaacagctggtcaccagcagaacgccggacgatctgccggccttcaatcgcgaagcgctacgcctgctcggcgccggcatcacgccgccagtgtaattttttcccgaaacccagcgtgttgtcggtaaatttgatttcgtccggacgaatctcccataccggcgccgacagcatgcgggccaccgggaagcgcttgacgtagcgctggcgcattcgcgcctcttcgtcaccgctcagacgacggatctcgcctttgaactgcacgccgcggatcagggccacggtttttggctggccgttaaccgtgccggccaccttcgccctctgtccggtcatctggccatggcgggtgtgctcctcgctgagcagataaaaggccacggtatccgggtcatagacgtaaaaggcattcgcgcaccacagctcgtcttcacgggagacgcaccaggtgacgacgtgctgtttactcagccagcgaccaatggcggcaagcgtatccatctttcttctccattatgctatggtgcacacaccttaccatagtgactttgtgaccgtgtgctggtttctgtatctcattcgaaccgcggataatcgcctttataccggcatcaccaccgacgtgccacgccgctttcgccagcatcaggcgggaaaaggcgcaaaggcgttgcgcggcaaaggcgacctgcagctggcctttagccacgaagttggtgaacactcacttgcattgcgactggaatatcgcgtcaagcagctaacgaagcgcgaaaaagagcgcctcgttgccggagaggatgccttcgaaaccctgctggcaaggcttaaagacgattaaagtgctcgctgtattctacctggccatggacgccgtcgagggcgtcatccgccagacggtgaacctggaacgcctcggcgctgtccggccagcggcagcggagatcgaagcgcgcggccggttcaaagccgaagcgacggtataaatccgggtcgcccagcgtcaccaccgcggcgtagccaaactcattcagcgagtccagcccttcataaaccagctgccggccaatgccctgtccgcggtagcgttcatctaccgccagcggcgccaggccgacccactgcagctcctcaccttccaccgccaccgggctgaaggcaacgtagccgatcacctggccttcatcatccgtcgccactacccccagcgtgatcagtccatcttcacgcagatcgtgcaccagctgcgcttcggcatcgcggccgaaggtacgacgcagcagcgcgtcgattcccggtgcatcaatcccaatctccactcgaatcagcatgcctcacctaccgatgtctgttcaggtttctgcgggctcttcagtccagcttcgacaaaatccgccagttgcagcaacatcacgcgcagcgcttttggcatctgctcgagctcaatggcgtccatcaaattttttacatacagccccagctccgtatcgccttcaatgaccagacgacgctggaagaatagcgtatccggatcctgcttgcgcgcggcgatcattaacagatcgctggcgtcggcgctgaagctgacgtcggcgtcggcctgctggctgaccaccagtcgaccatcgactaccgaggtataccacagcagaccgatgtcacgcacatgaatacttaaccaacgcccctcaagaaactccagctccccctccgccagcgcctggcgaaactgccagctcagcacttgctccagcacctggcgcttgagggcaaaaggcgccagcttaaccggcacgctcattaaagacgggccaaagtggaccagccgggaacgcagtttatccaacacaagctttactccatgaatgcaatagttccgctattgtgccatatcacataaacaacatagcggcgtaaatcaacaaaaacgcgatgacggccgccagttattggcgccgccaatacacttttaactgcctcaaatcaaaaattgtcaccagaaggttaactaaaatccctgctcgttaaccattcagcgtccctgacgggccgcatttttcaggaaaaattatggagctgctctgcccagccggtaaccttccggcgcttaaggcggccatcgaaaacggcgccgatgccgtctatatcgggctgaaagatgacaccaacgcccgccactttgccggccttaatttcaccgaaaagaaactgcaggaagccgtcagctttgtgcatcagcaccgtcgtaagctgcatatcgccatcaataccttcgctcatcccgacggctacgcccgctggcagcgagcagtggatatggccgctcaactgggcgccgatgcgctcattctggccgatatcgccatgctggagtacgctgcggagcgttacccacacattgagcgtcacgtttcggtgcaggcttccgccaccaatgaagaggccattcgcttctatcatcgcaacttcgacgtcgcgcgcgtcgtactgccgcgcgtgttgtctattcatcaggtgaaacagttggcccgcgccacgccggtgccgctggaagtcttcgccttcggcagcctgtgcatcatggcggaaggccgctgctatctctcttcctacctgaccggcgaatcgcccaacaccgtcggcgcctgttcgcctgcccgcttcgtacgctggcagcaaacgccgcaggggctggaatcgcgtctcaatgaagtgctgattgaccgttatcaggatggcgaaaatgccggttatccgacgctgtgcaaaggccgctacctggttgatggcgagcgctatcacgcgctggaggagcccaccagcctcaacaccctggaactgttgccggaattgatggccgccaatatcgcctcggtgaaaatcgaaggccgtcagcgcagcccggcttacgtgacccaggtggcgaaagtctggcgccaggcgatcgatcgctgcaaagccgatccgcagaatttcgtaccgcagtccgcctggatggagaccctgggcgccatgtccgaggggacacaaactacccttggcgcttatcaccgtaaatggcagtgagaaacatgaaatattcattagggccggtgctgtactactggccaaaagagacgctggaagatttttaccagcaggcggcaaactgcagcgccgacaccatttatctcggcgaagcggtatgcagcaaacgccgcgccaccaaagttggcgactggatcgaaatggcgaaaacgctggccgctagcggcaagcaggtggtgctctccaccctcgcgctggtgcaggcctcttctgaactgggcgagctgaagcgctatgtcgataacggcgaatttctgattgaggctagtgatttgggcgtggtaaatctctgcgccgaacgcaagctaccgttcgtcgccgggcatgcgctgaactgctacaacgccgtcaccctgcgcctgctgcggaaacagggcatggtgcgctggtgcatgccggtggaactctcccgcgactggctggctaatttactgacccagtgcgaagagctgggtatccgcaaccagtttgaagtcgaagtgctgagctacggccatctgccgctggcttattccgcgcgctgctttaccgcccgctcggaagaccggccaaaggacgagtgcgaaacctgctgcatcaagtacccaaccgggcgcagcatgctgtcgcaggagaaccagcaggtgttcgtgctcaatggtattcagaccatgagcggctacgtctataacctgggcaatgagctgacctccatgcacggcctggtggatatggtgcgcctgtcgccgatgggcaacgagaccttcgccatgctcgaggccttccgcgccaacgaaaacggcgctgcgccgctggatctcaccagcaatagcgattgcaacggctactggaaacgattgccaggactggtgcttcaggcctgataaaccgctcactttgttaacaacagtgctcagattttaatgcattattaaagatgcagcttttctggctggcgcgtccaggatgcgccaggctggaagaagaccttcaatctgatgacgatgctgtagcaaagtgagcctttatgactgacaaatctgttccattctcggtgctcgatctggcgccgatcccgcaaggatcttctgccaaagaagcctttacccactctctggatctcgcccggctggccgaatcgcgcggctatcatcgctactggctggcggagcatcataatatggtcggcattgccagcgcagcgacctcggtgctgattggctatctcgccgccaacaccaccaccctgcatctcgggtccggcggcgtgatgctgcctaaccactctccactggtgatagctgagcagttcggcaccctgaacaccctttaccccgggcggatcgacctcggccttggccgcgcgccgggcagcgatcagccgaccatgcgcgccctgcgtcgccatatgagcggcgatgtcgataatttcccgcgcgatgtagcggaactggtggactggtttgacgcccgcgatccgaacccgcacgtgcgcccggttcccggctacggggagcgcattccagtatggctgctgggctcaagcctctatagcgcgcaactggcggcgcagctcggcctgccgtttgccttcgcctcgcacttcgcgccggatatgttgttccaggccctgcatctgtatcgcagcaatttcaaaccttcggcgcggctggaaaaaccgtacgcgatggtgtgtatcaatatcatcgccgccgacagcaaccgcgatgcggagtttctcttcacctccatgcaacaggcgtttgtgaagctgcgtcgcggcgagaccggtcagttgccgccgccggtggaaaatatgcatcagctgtggtcagcgtccgagcagtatggtgtgcagcaggcactgagcatgtcgttggtcggcgataaaactaaagtccgccatgggctagagtcgattctgcgtgaaaccgaggcggacgaaatcatggtcaatggccagatcttcgaccaccaggcgcgtctgcattctttcgatttagcgatgcaggtgaaagaggagctgttggggtaacacacacgtcagcccggtggacgtcgcgccaccgggcaatagctttactgataaaccggcagcagattgacgctcgacaggatatgtacaaccgcattgccgaggccaaagagcaggatcagcacaatcattggcgttccgccccaaacgcggaactgtgggctgccgaagcgtttgcgtgaggcgtgagccagcagcgccggtacaatcgccgcccagatcgtcgccgccaggccagcatagccgatggcgtagaggaaaccatcgggtttgaccagtccgccaatcatcggcgggataaaggtcagcagcgcggttttaaagcgtcccatcgcgctatcgtcaaagccaaacagatccgccaggtagtcgaacagccccagcgttacgccgaggaacgaactggcgacagcaaagttcgagaacaccaccagcagcagatccagactccgactattcagcacgccgctcagcgcctgcaccagcacatcaatgttgccgcccttctgcgcgatgtcgataaactgcggacgagggatgttacccatcgtcaccagcagccaaacgacatacagacccagcgccagcagcgtaccgtaggttaagcagcggatgatggtgcgcggatcttttccgtagtatttcatcaggctcggcacgttgccgtgatagccaaacgaggccaggcagaacgggagcgtcatcagcaggtatggcgcataggaggcattcttctccgcaacgttaaataacgtcgtcggctcgacgtgcccgagcaggctaccgaaggtcaggaagaaggtgatcaccttagcgcccagtacgatagccgtcatgcggctcaccgctttggtgctcatccagacgataaacgccaccagcagcgcaaagccgaagcccgccgcgcgcgccggcaccttcagcgacagttcactgaaggtgtggtggaggatcgaaccgctcgccgaaatataggcgtaggtcaggatatagagcacaaaggcgattgatacaccgttcaccaggttccagcccttgccgagcaggtctttggtaatggtgtcgaagctggagccgatgcggtagttaagattggcctcgaggatcatcaaaccggagtgcagcatgcagaaccaggtgaagaccagcgccgccagcgaccagaaaaaccacgcgccggacatcaccaccggcagcgagaacatgcccgcgccgataatcgtgccgccgataatcaccacgccgccaaacagagacggacgggttgccgtagtggttagtgtcgccatttaccgatttctccagtcgaaaatacttcgctcacgttgagcatgacgcactgtaccagtacacgagtacaaagggaataaaaaaagccccaatcatgacgatcggggctgtattatttagtttacgctagcgggcggcgttgattacgcatcgccaccgaagcgacggcggccggctgagtcatcgcggcgcggcgcggatgcatcgtcacgacgcggcgcacggccttcacgacgttcgccgctgaaacgacgtccttcaccacgaccgccttcacgacgttcgccaccgaagccacggccgccttcacgacgctcgccgccaaagccacggccgccttcgcgacgctcaccgccgccacgacgttcggtgcgcggctgcgcatcgcccagcagctgcatgttcatcggcttgttcaggatacgggtacgagtaaagtgctgcagcacttcgcccggcatccctttcggcagctcaatggtggagtgagaagcgaacagcttgatgttaccgatgtaacggctgctgatatcgccttcattggcgatcgcgccaacgatatgacgcacttcaacgccgtcatcgcgacccacttcaatgcgatacagctccatgtcacccacgtcacgacgctcacgcttcggacgatcttcgcgatcgccgcgcgggccgcgatcattacggtcgccacgacggtcgaaacgatcgtcacgatcgcggaattcacgacgtggacgcatcggcgcgtccggcggaacgatcagcgaacgttcgccctgagccatcttcagcagcgcagcagccagcgtttccacgtccagctcttcaccttccgccgtcggctggattttcgccagcagtgcacggtactgatccagatcgctgctttccagctgctgctgaactttcgcggcgaatttttccagacgacgcttgctcagcagctccgcgttaggcagttccacttcaggaatggtcagcttcatggtgcgttcgatgttgcgcagcagacgacgctcgcggttctcaacgaacagcagcgcgcggccagcacgaccggcacgaccagtacggccgatacggtgaacgtaggattcagaatccattgggatgtcgtagttcaccaccaggctgatacgctcaacgtccaggccacgggccgcaacgtcagtcgcaatcaggatatccagacgaccatctttcaggcgttccagagtctgctcacgcagcgcctggttcatgtcgccgttcagcgccgcgctgttgtagccattacgctccagcgcttcagctacttccagggtcgcgtttttggtacggacgaagataatcgccgcatcaaagtcttccgcttccaggaaacgcaccagcgcttcgtttttacgcatgccgtaggcagtccagtagctctggctgatatccgggcgagtcgtcacgctggactgaatgcgcacttcctgcggctctttcataaagcgacgggtaatgcgacggatagcttccggcatggtggcggagaacagcgcggtctgatgcccttcagggatctgcgccataatggtttctacgtcttcgataaagcccatgcgcagcatttcatctgcttcatccagtaccaggccgctcagtttggagaggtccagggtgccgcgcttcaggtggtccagcagacgacccggggtaccgacgacgatctgcggaccctgacgcagggcgcgcagctgcacgtcataacgctggccgccgtacagggcaaccacgttcacgccgcgcatatgtttagagaattccgtcattgcttcagcaacctgtaccgccagctcgcgggtcggcgccagcaccagaatctgcggtgctctcagctcaggatcgatgttgttcagcagcggtaaagagaatgctgcggttttaccgctaccggtctgggccatacccagaacgtcgcggccgtccagcagatgcggaatgcactcagcctggatcggagatggtttttcgtaacccagatcggtgagcgcttcaaggataggagccttcaggcccagatctgcaaaagtggtttcgaattcagccatgtagtacgtgtgcctcaaaattaatggcggccagtctacataactcatcgtgaaaatttacggtaattttcattgaaaagtgtgaaccggctcaaagtaggtgtattaacgaacaacaacgccctcacccgcgaaggtgatggcaagcaaaaaactatgggctgatgtgttcgtcagctattgctggtccgattctgccaggtcatcttgctcctggcccaagagcgataattccaacaatgcgtatcggtgctcaacgtagttgtgtacgttgttggcgaccgccagtttgaacagtgccgtagcgctgtccttgtcccccagacttaggtagtacttacctaaatagaagttggtttcactgagatgctcagcgagcgaggtgttatccgttgcgtctgccttcagacgagtcatcagctctttttcgctaatgtcgccaaggtagaactcgacaatgttccatccccattgctctttatccgacttgtttaagcgctctctgagtgcttcaagcgcccgcttctcgtcgagtttacgctcggcgatataaagccacaggctacggaaaggatcattgggatcgtcttgataaaacgccagcagatcatcttgcgctaacttagcccggccgccgtaatacagggcgataccgcggttcaagtgcgcgtagttgtaagttggatcaagctcaagtacagaatcaaacgcttcataggcagcatcaaaattgcctgcctgcgttaagtaaatgcctaagtaattgaatacttccggcatatcgggtcggattgccagcgcttgtgaaaaatcatttcgcgcaagtgccctcagaccgagactatcatacaacactccgcgctcatataaaagctgtgcgcgttcgtcatcggataaagcccgactggcaagaatttgttccatgcgtgccagaatcacttcttgctgtaaagtcggttgcaatggtactgcgaggacggcgtccttacgccaggcggtgctactgcatcctgccagcgtgagagctgtcgccacgaaacaccagcgcaaaaaaggcttcatttcccactcccgaagacaacgattggatgaacgtcctgttccccggctgcaaacgaggcgtcctgcccgtaaaacgccctccgcaaaagcggagggctaacggcaaccttactcgccctgctcggcagccggagcttccggcgctgcggcagacggagtctgttcagttgcttctttaatgctcagacggacacggccctggcggtcaacttccagaaccttaaccggtacttcctgacccatctgcaggtagtcagtcactttctcaacgcgcttgtcagcgatctgcgagatgtgaaccagaccttctttaccgccgccgatggcaacgaatgcgccaaagtcaacgatacgggtcactttaccattgtagatgcggccaacttcgatctcagcggtgatctcttcgatacgacggatagcatgctgcgctttgtcgccgtcggtcgctgcgatcttcacggtaccgtcatcttcgatctcgatggtagtaccggtctcttcggtcagggcacggataacagaaccgcctttaccgataacgtctttgatcttgtccgggttgatcttgatggtgtggatacgcggtgcgaattcagagatatcgccgcgcggcgcgttaatcgcctgctccatcacgcccaggatgtgcagacgcgcacctttagcctggttcaatgcaacctgcatgatttctttggtgataccttcaattttgatatccatctgcagcgcagagataccgtcgcgggaacccgcaactttgaagtccatatcgccgaggtgatcttcgtcaccgaggatgtcagacagcacgacgaagttgtcgccttctttcaccagacccattgcgatacccgccacagcggcttttaccggcacgccggcgtccatcagcgccagagaggcgccgcagacggaagccatggaagaggaaccgttagattcggtgatttccgataccacgcgcacggtgtacgggaattcttcaatagtcggcatcacggccagtacgccgcgcttcgccagacgaccgtgaccgatttcacgacgcttcggagaccccaccatgccagtttcgcctacggagtacggagggaagttgtagtggaacaggaaggagtcggtgcgctcgcccatcagttcgtcgatgttctgcgcatcgcgtgcggtacccagagtcgcggtaaccagcgcctgcgtttcgccacgggtgaacagcgcggaaccgtgagtacgcggcagaacgccggtacgaacgtccagaccacggatcatatctttttcacggccatcgatacgcggctcgccggccagtacgcggctacgaaccacatttttctcgatggcgtgcaggatttcacccagctcgttagcgtccagggtttcatcttcagcaaccagcgtggcgatggtttcagatttgatcacgtcaacctgagcgtaacgctcttgtttgtcggtgatacggtaagcatcgctcagacgggattcagccagcgcagccacgcgcgcgttcagcgcttcgttgaccgcttccggctgccagtcccaacgcggtttaccggcttctttcaccaggtcgttgatgttctgaataacaatctgctgctgctcgtggccgaagaccaccgcgcccagcatctggtcttcgctcagcagttccgcttcggattccaccatcagcacggccgcttcggtaccggcaaccaccaggtccagtttgctggacttcagttcttcctgggttgggttcagtacgtactggtcgttgatgtaacccacgcgcgcagcgccgattgggccattgaacggaataccagacagcgacagcgcagcggaagcaccgatcatcgcgacgatgtctgggttaacctgcgggttaacggaaacgacggtggcgataacctgaacttcgttaacgaagccttccgggaacagcgggcgaaccgggcggtcaatcagacgcgcgatcagggtttcgccttcgcttggacggccttcacgacggaagaaaccacccgggattttaccggcagcgtaggtacgctcctggtagttaacggtcagcgggaaaaagtcctggcctggcttcgcttttttctgacccacaacggtaacgaataccgcagtgtcatccatgctaaccatcacagcggccgttgcctggcgcgccatcatgccggtttccagggtcacggtatgctggccgtactggaatttacgaacgatcggattaagcaaaattctatcctttttatctataaatcacgccatatccacgacatagcgtctattgacccgatcttctgcatcctcgcgactaatgacaacctttacccgcccctgcggatgaagcctctcattagccgcgcgaacctctgcatgaagatcattactagcaacaatacatgagttttgaatgaattgctgccgcccggtcgaaaaaaggggccgtcaggcccctttttctgaaactcgcagaattagcgacgcagacccagacgctcaatcagcgcagagtaacgggcaacatctttacgtttcaggtagtcgagcagtttacgacgctgagaaaccatgcgcagcagaccacgacggctgtggtgatcttttttgtgctctgcaaagtggccctgcaggtggttgatctgtgcggtcagcagtgcaacctgaacttcggtagaaccgctgtcgttttcgccacgaccaaactcagaaacgatttttgctttagcttcaacgcttagagacattttataactccaaaaattaaaagaaagaaagggtgccgatctctaattcagcgacccctgatgcaacgcccgaaaatgttaaaacacgttagcggacgttaagcggcgatattctactcgtagcaggcttttatcgcaagaaaagcgcttacgccgggtattccaccaccagacgacgcggggccacgcggccttcatcgtcaatttcgcccatgccgagaaacttgccggactcgctctccatcacccgcaccagcccgttaagcggcgcgcctgactgacgtaccgggttgccgttcttaaagtagactgcggaggtttctggaatattaaccagcgggtaatccgaggccgggctgtccatcggcatcagcagcggatcaagcaactgagcggcaggaatatcctgcgccgccgcctcatcgaccagcgcctgcagctgctcgagggtcaccatccgctcgaccgggtatttgcttaccgccaggcgacgcaggaaaatcacgtgcgcgccgcagccgagcttctcacctaaatcatcgataatcgtccggatgtaggtgcctttcgagcagtggatctccagctccagctcatcgccttcgcggcgaataaacagcagctcatagacggttatcggccgggcttcccgcggaacttcaataccctggcgagcatattcgtatagcttcttgccctgatatttcagcgccgaatacatcgacggcacctgctgcgtctcgccgcggaagctgtccagcgccgccgccagctgttcgtcgcaaaaagtcagcgggcgctcttccaccacctgaccgtcggcatcggaggtatccgtgcgctggccaagtttggcgatcacgcggtaacgcttatcggagtccagcagatactgggaaaacttggtcgcttcgccaaggcagatcggcagcataccggtcgccagcggatccagcgcgccggtatgcccggcgcggttggcgttataaatacgttttactttttgcagcacatcgttactggaggcgccctgaggcttgtccagcaacaatacgccatgcacgtcgcggccgcgacgacgaggacgactcatcagtcctccttgctgtcgtccgggttcacacgacgctcatcgtcgtgtttcaccacgctggtgaccaggttggacatacgcatcccttcgaccagtgagttgtcgtagaagaaagtcagttccggtacgatgcgcagacgcatcgctttccccagcagagagcggataaagccagaagcttcctgcagcgctttgatgcccgctttcaccgcggcttcatctttgtcgttaaggaaggtgacatacaccttggcataggccaggtcacgggacatttccacaccggaaacggtggtcatcatgcccagacgcggatctttaatttcacgctgcaggatgatggcaatctctttttgcatctcctgggccacacgctgcgggcgaccaaattctttcgccataataagttctccagaataaagacaaaaaaggggccaaaagcccctttttaaaatgattgccgggtggcgcttcgcttccccggctgcttagccatcaaatgattaatcgatgctacgctggatttcgatgatttcgaacacttcgatcatatcgccaacgcgaacgtcgttgtagttcttcacgccgataccacattccatgccgttacggacttcgttaacgtcatctttgaagcggcgcagggattccagctcgccttcatagataaccacgttgtcacgcagaacgcggattgggttgtgacgtttgatcgtcccttcggtaaccatacagcccgcgatggcgccgaatttcggcgatttgaagacatcacgcacttcagccagaccgatgatctgctgtttcagttccggagacagcatgccgctcatcgccgctttcacttcgtcgatcaggttatagatgacggagtagtaacgcagatccaggctttccgcttcgataactttacgcgcagaggcatcggcacgaacgttgaagccaaccagaatcgcgttggatgctgctgccagggtagcgtcggtttcggtgataccacctacgccggaaccgatgatcttcactttcacttcgtcggtagacagtttcagtaaggaatcggaaatcgcttcgacagaaccctgtacgtccgccttcagtacgatgttcacttcgtgaacttcgccttcggtcatgttagcgaacatgttttccagtttagatttctgctgacgcgccagcttaacttcacggaatttgccctgacgatacagcgccacttcacgcgcttttttctcgtcacgcactacggtcacttcatcaccggcagccggcacaccggacaggccgaggatttccaccggaatggacggacccgcttccagcacttcgcgacccagttcgtcacgcatcgcgcgcacacggccatattcgaagccgcacagaacaatgtcgcccttgtgcagagtaccttcgcgaaccagaacggtagctaccggaccacgacctttatcaaggaaggattcgatgaccgcgccgctcgccataccgttgcggaccgctttcagctcaagaacttcagcctgcagcaggatcgcgtccagcaggtcgtcgatgccggtacccgctttcgcggaaacgtggacaaactggctctcgccgccccactcttccggcaggatgccgtactgggacagttcgttcttcacgcgatccggatcggcttctggcttatcgatcttgttcaccgccactaccaccggtacctgcgccgctttagcgtgctggatagcttcgatagtctgcggcatcacgccgtcgtctgccgccaccaccagaaccacgatatccgtcgcctgcgcgccacgagcacgcatggaggtaaacgcggcgtggcccggggtatccaggaaggtgatcatgccgttgtcggtttcgacgtggtaagcaccgatgtgctgggtaataccacccgcttcgccggaggcaaccttggtagaacgaatgtagtccagcagcgaggttttaccgtggtcaacgtgacccataatggtcacgaccggtgcgcgcggttcagccgccgcgccggtgtcacggtcgctcattacggcttcttccagttcgttttcacgacgcaggataactttgtggcccatctcttcggcaaccagctgtgcggtttcctggtcgatgacctggttgatggtcgccatggcgcccagcttcatcatcgctttgatgacctgagaacctttcaccgccatcttgttagccagttcgccaacggtgatggtttcgccgattacgacgtcacggttaacggcctgcgctggcttctggaagccctgctgcagagcggaacctttacggtgcttaccgcctttaccgccgcgcacggccgcgcgggcttcttcacgatcagctttcgattcagcgtgtttgttgcctttcttcgccggacgagccgctttgctgctacggctacggccgcgaccgccttcgacttcacgatcgttatcatcttcagcctgacgagcatgctgtgatgtggtgacgtgatagtcgctgctatcttccgggctgtctgaggtttcagaccaatttttttcgttttcttcagccatacggcgtgcttcttccgctacacggcgcgcttcttcttcaagtttgcggcgtgcttcttcttccgatttgcgcttcaattccgcggcttcgttctcgcgacggatcttttcagcctgggcggttttggtcatttcgtcggtatgttgattgctcactttgtctttttccgcagcttcacgtttcgctttatcagcgacttcacgtttagcttgttctgcggcctcacgttcagcttttaattgcgcctcgcgtttcgctgcttcttcagcttcacgacgggcctgctcttccgcttcacgctgcgcctgctcttccgcggccaggcgttcagcctcttgcggatcgcgtttcacaaaggtgcgtttcttgcggacttcgatttgtaccgatttactctttccaccggtacctggaatattcaacgtactgcgcgtcttacgctgtaacgtcagcttgtctggcgccgagccgtgttcacggttcaggtgcgtcaacaaagtttgtttctcttgcgaggtcacagaatcatcagccgatttgcggatgcctgcgtcagcaaattgctgtatcaggcgatccacagaggtctgaatctctgaggccagcgctttaatagtcacatctgtcatgctgttccttcctgctacagtttattacgcttcgtcgccgaaccaacaaatgttgcgagcggccatgatgagctcgccagctttctcgtcggtcatcccttcgatatcagccaggtcatcaacgccctgctcggcgagatcttccagcgtacaaacaccacgggcagccagtttgaatgccagggcacgatccagaccttcgagattcaacagatcatcggcaggtttgttatctcccaggctttcttcctgagccagcgccagcgtagtcagtgcgtttttcgcacgctcacgaagtgcttcaacggtggcttcatccagaccgtcgatttccagcagttctttcatcggcacataggccagctcttccagcgaggagaagccttcttcaaccagcactgtcgcgaaatcttcatcaatatcaagatatttggtgaaggtatcgatagcggcatgcgcttccgcctggtgcttagcctgcagatcgtcaacggtcatgacgttgagttcccagccgctgagctgtgaagccaggcggacgttctgaccgttacggccgatcgcctgcgccaggttgcccgcttctaccgcgatatccatggtgtgtttatcttcatccaccacgatggacgcgacgtctgccggcgccatagcgttaatcacgaactgcgccgggttatcatcccacaggacgatatcgatgcgttcaccacccagctcagtcgacacggcctgcacacgcgcaccgcgcataccgacgcaagcgccaaccgggtcgatgcgcttgtcgttggttttcaccgcgattttggcacgagagcccggatcgcgagccgccgctttgatctccagcacttcttcaccgatttccggcacttcgatgcggaacagttcgatcagcatctcaggtttggaacgggtgacgaacagctgggcgccacgcgcttccggacggacagcgtacagtacgccgcgaatgcggtcgcccggacggaagttttcacgcggcagcatatcttcacgcaggatcacggcttcagcgttgttacccagatccagtgtgatattgtcgcggttcacttttttcaccacgccggtgatgatctcaccttcgtgctcgcggaactgatcgaccaccatcgcgcgctcggcttcgcggactttctgcacgataacctgcttagcggtctgggtggtgatacggtcgaaggtaacagattcgatctgatcttcgacatagtcgccgacgttcatgctttcatcttcgaaacgcgctgcttccagcgtgatctcgcgcgtcggctgggtgacttcttctacaaccagccaacgacggaaggtatcgaaatcgccgctcttgcggtcgatttcaacgcgaacgtcgatctcttgttcgtattttttcttggtggccgttgccagcgcgctttccagcgcttcgaaaattttctcacgcggcagcgctttttcgttggaaacggcttcaacaacagccaaaatttctttgttcatcggggcctttcacctcaatccagactgttaaaagtggggaaccaggttcgccttctggatgttactcagcgcgaacacttcatctttgccttcgacggttaccgtgatcatctcaccgtctaccgctttgataatgccctgccatttgcggcggttctgaaccgccatgcgcagcaccagcgcaacttcttcgccggtgaaacgttgatagtgttcggcggtgaacatcggacggtcaagaccaggcgaagagacttccaggttgtaagcgacagtgatcgggtcttcgacatccatgacggcgcttacctggtggctcacatcagcacaatcatcaacgttgatgccatcttcactatcaatatagatgcgcagtgtggatgtgcgaccgcgaataaattcgatgccgaccagctcaaagccaagcgcttcaaccggcgcagtgagcatctctgtcaatttttgctctaatgtggacaaacccacccccaagacataaaaaaagggcgtatagcccagttattctgaagtcagataacaaaaaaccccgataaatcggggctttagataactgaaccctgagatcgccatggcgatctggaacaccttccgcaagaattctttcaaattcggctacgaaggacacctagtcctcacagtatatttgaaaaagtacttaatgggaaagtggttgcgggggccggatttgaaccgacgaccttcgggttatgagcccgacgagctaccaggctgctccaccccgcgcctgaaacgtggcatattttactctttttgagcaaaagacgcaaatactgctgggatttggtaccgaagacgggacataaaatcgggatgaattgtaacggcgattagtatattttgtcaacatgctttttagcgcccccgattgccgtttgtgctggtatttcaggcttttttagcaaaaagatgatgaagcacttcctgtcgccagtaaaagatggttaaatgaatactcacaattaatgcataaaaatgcagttaaggttgttgggtcgaactcaccacagtctatcgagcagggttttattttatgacgacgattctcaagcatctcccggttggtcaacgtattggtatcgctttctctggtggactggataccagcgccgcgctgttatggatgcgcaaaaaaggcgccgtgccttatgcatataccgctaacctgggtcaaccggacgaagacgactacgatgctatcccgcgccgcgcgaaagagtacggcgctgaaggcgcccgtctgatcgactgccgcaaacagctggtcgcagaagggatcgccgcgattcagtgtggcgctttccataacaccaccggtgggttgacctacttcaacaccacgccgctaggccgcgcggtcaccggcaccatgctggtggcggcgatgaaagaagacggcgttaacatttggggcgatggcagcacctataaaggcaacgatattgaacgtttctatcgttacggcctgctgaccaacgctgaactgcagatttacaaaccgtggctggacagcgactttatcaatgagctcggcggtcgtcacgaaatgtccgaatttatgatcgcctgcggctttgattacaagatgtcggtcgagaaagcctactccaccgactccaatatgctcggcgcgacccatgaagcgaaagatctcgaattcctgaactccagcgtcaagatcgtcaacccgattatgggcgtgaagttctgggacgaaaacgtgaagatccctgcggaagaggtcaccgtacgctttgagcagggccatccggtggcgctgaatggtaaaacctttgccgatgacgtcgagatgatgctggaagccaaccgcatcggcggtcgtcacggcctgggcatgagcgaccagattgaaaaccggattatcgaagcgaaaagccgcggcatttatgaagctccggggatggcgctgctgcatattgcctacgagcgtttgctgaccggtatccataacgaagatacgattgagcaatatcacgcccacggtcgccagttgggccgcctgctgtatcagggccgctggtttgattcccaggcgctgatgctgcgtgattcgctgcagcgctgggtcgccagccagatcaccggcgaagtcaccctcgaactgcgtcgcggtaacgactactcgatccttaatacggtatcagacaacctgacctataaagcggagcgtctgaccatggaaaaaggcgattccatgtttactgccgaagaccgtatcggccagctgaccatgcgtaatctggacatcaccgatacccgcgagaagctgttcggctatgcccagtctggcctgctgagcgcctcctcggcaaccggtttaccgcaggttgaaaatctggaaaacaaaggtaaataatcgcctgacaatgttgctttccgccggcggctcaccgccggctttttattttgaatgacccaccaacgtaaaaaaaatgccatgacgcattttttccttatcgccagaccagcaaaactgttgactataatagcctcaattgattaattcatatctggtgatacacatcatgaatattaaaccgccgatcaggccgcaaaagaccattgaccggctgatcgatgtacttgagccacacgcgacccccgttaacgcgatcgccagaaaaagactgacatgggaatataaaggcaaaacccagctctttatttttaaaaaaggcgagctgtcgattattcgtaattccgacaggctactgatggtgaccgtctatgagccgcatcttttcggcgtggcggaaatgctgcagcccagccgcagccacagcctgcgagccgaggtatcatgcgaactgctacggatcgaccacgacctggcttcggcgctttttcgtcagcataacctgtgggaagaggtgaccagcctgttggcttatcatacctcgtatatggtgtatcgtgacgatctggtcctgcagcagcgtacctattcggtcatccgtaaccagctgctggagatgatgctattaagcgaagagacccgacagcgagtatctattcttgagtatattcaggacaggacccttctgtcgcgtagcagtattctcaatgtattgtcagcattaaagaaaggcggttatattgcctttgcccgcggcggttatttacaaaatatcgtctcacttcctgaaaaattctgacctgcactcctcctatcatttattgttatttgctgcagcggggaagatgtttaaatttaaaccaataaccgttaccgctaaaagaacaaaaattttatgctaagcgcctgggtttcccggaagacaatctattcctgagttcgccagcagacgaccacaaacggcgttaaccgccgggcctgcaccggctcaggatatgccagcggaaatcggccagacgtgtgcggcggtagcgagagttgccccctcgcctgccgcgaccataacaatgagatgcacgaacccgttaattatgcccgaacgcccatatcgggcttttttttatctgaaggaatttaataatgaagtctattgctgcaaaaatggttgccgtaacgatcgctttgggagccagcagcgctgcctgcgcagccgttaacctgcatggagaagctggcgccgagtttaccaatctgtccgccagctttggcgccggggaaccgggtatgacgttcagttctcagtgggctcatagcgacaacgacggagatagtgtaggactgggaatgggttataactttaaccttggcccttttctgatgaccctgggcggtaaggcggtctatctgaacccaaaagatggtgatgaaggttacgccatcgccgccggtggtggcgctgaactcccccttggtcagtatttcacgcttttcggcgagggctattactcaccggactcaatgtccagcggcgttgaggattatgtggaggccaatgccggggtacgccttaacgtgctcccctctctgaatatcgaagctggctatcgctatattgatatggcagggaaagatggcaatcgcgataacacgctggccgacggcgcttacgccggggttaacttccgcttttaactcttcacagggattgccggtcggcagtccctgtttcattctcagctggtcagcggcacgcttttcagtacgcggttgatctcttgtaggcctgcaatattattctctttgcggtaaacctcattcatggacgccatctgctccaggcgggtcagggcgccatacaccttatacgcctcgctgtgtctgtcgaacacatcgcggcgctccacgtcctgcagataatgacttttcaacgaatggttaaggcgactaatcagtgccgtattgtcctggaaatagcgcctcaccgcctgggcatgattcgctgtagtcccagactcactgggcgataccggtacggttagcgcattaatcgtctccaccgtttgggagggcgatgttgaactgcacccagctaaaccgagcacgccggcgacgataagcaacccgatcttgttcattgtgtcacttcacctctgttaatttgacgaggcgactttaacgacagtaaaaggaggcaaccagcgaagagatgtttataaataaatgtccagcggggacaaaaacaaaaaaagacgcttttcagcgtcttttttctggaatattggtaccgaggatgggactcgaacccacaagcccgttagggcactaccacctcaaggtagcgtgtctaccaattccaccacctcggtacagaatacttagtgcgggatatcgctggtcggctgagccggcgcagttggctgagtttgctccgttttcggcgcgctcagattatcccactcacttcctttactggtcttgttgctgttgatattacccagcgccagactgatgatgaagaacagcgcagccaggatgccggtcatacgggtcataaagttgccagaaccgctggacccaaacagtgtgccggaagcgcctgcaccgaaggaggctcccatatcagcgcctttaccttgctgcagcataaccagacctacaaggccaatcgctacaataaggaaaacaaccaaaagagcttcgtacataatcaacctgttccttgcggattcgccgcataccaagtgctccgaccaataaagcgggacgttttaacgtttcccactgaagcgggtgtgaatactaaccaaagcgaatgaccttcgcaagggcaatttcgacacattgtatcaactgcagaaaaaaacagcaaaaagccaattttcgatcataaaaaaggcggcaagcgccgcctttttaaccacttagccggcaaagctaaacgctttttaccgcctcagcgatgcggtgcgcaaactcgtgcacctgatcttcatgctcgccttccaccatcacgcggatcagcggctccgtacccgatttacgcagcaggacacggccgcgttttcctaacgccgcctccacttccgcggtcaccgctttgacatgctcattctccagcgggttaccgctgccctcggtaaagcggacattcaccagcagctgagggaacattttcatcccgctgcacaggtcatgcaggctcatgtggttgcggaccatcgccgcgaccacctgcaggctggcgacaatgccatcgccggtggtggttttatccagcaggatcacatggccggagttttccgcaccgatgcgccagcctttttcctggagcatctccagtacatagcggtcaccgaccttcgcgcgggcaaacgggatgcctaactgcttgagcgccagctccagccccatattactcatcagcgtgccgacggcgccgccgcgcagctgcccctgacgcaatccttcccgggctatgatatagaggatctggtcgccatcgactttattgccttcgtggtcaaccataatcacccgatcgccatcgccgtcgtaggcaatacccagatcggctttttccgccagcacgcgcgcctgcagcgcccgcacgtcagtggcgccgacctcttcgttgatgttgagaccgtctggctcgcagcccatcgcgataacctgggctcccagctcgcggaagacattaggggcgatgtgataggtcgcgccgtgcgcgcaatccaccaccactttcagcgttcccaggctcagttcgttgggaaaggtacccttacaaaattcaatgtagcgccccgccgcatcgacgatacggctggctttgcccagctcagccgaatccacgcaggtgagctctttctccatttcggcttcaatcgcctcttcgacatcatccggcagtttggtgccctcaatggagaagaatttaatgccgttgtcgtagaaagggttatgtgaagcagagataacaatccccgcctcggcgcggaaggcgcgcgtcaggtaggcgatggccggtgtcggcataggcccggtgaacgacgcagagagccccgctgccgccagtccagcttccagcgccgattccagcatatagcccgaaatacgggtatccttgccgatgataattttacgcgaaccgtgacgcgctaacactttgcccgccgcccagcccagcttgagcacaaactccggagtgatcggcgcatcgccgacgcggccacgaataccatcggtgccaaaatacttgcggttactcataacgtttttttcccttagcggcgagggtggcttccaccacgcgcagcgcttctaccgtttctttgacatcatggacgcggataatctgcgcgccctgcattgctgcaatgacggcacacgccaggctgccgttcagccgctccgacggcccgacgttcagcaactgacctaccatcgacttacgtgacataccgaccagcagcggcagaccaaagtgatgaaactccccaagcctggccaacagttggtaattgtgggagagatttttaccgaaaccgaatcccgggtcgagcagcaatttttcttttgcgatccctgcctgttcgcagcgcacaatgtgctcattaaaaaaacgctcaacatcggcgaagacgtcctcatacttcggcgcctcctgcatggtttttggttgtccctgcatatgcatcagacacaccggcagtccggtttccgcggcggcctgcagcgcgccgggctcggtcagcgaacgaatatcgttgatgatatgcgccccggccctggccgattggcgaataacctccgccttggaggtatccactgagatccatacctcaaagcgctgggcaatggcttcaaccaccggtatcacccgcgcaagctcctcttccacactaacctcagccgcccctggccgcgtcgattcaccgccgatatcaatgatggtcgcgccggcgttgatcatcagattggcatgcttcaccgcctcaatcagcgaattatgggcgccgccatcggagaaggagtcaggcgtcacatttagaatacccatcacgtgagggtgagagagatcgagggttgagccctgggctacaagtttcatcacaaaatccctgagactgaagaggttaaaaaagaaaaaccccggagcggacgcccggggttttaaggttaaacaagcatcaacagcggtagcttacttgtcgcccagctgctctgacatggtgttgcccgggttcggcgtacgcggttcatcaaccggacgcggcgcacgaggcgtgccattgttgtcagagttgttagaagaacctggttcttcccaacccgctggcggacgaacttcgcgacgagccatcaggtcgtcaatctgcggcgcatcgatggtctcatacttcatgagcgcatctttcatcgcgtgcagaatgtccatgttgtcgttcagcagctggcgagcacgaccgtagttacgctcaatcagcgatttcacttcctggtcgatgatacgcgcggtttcatcggacatatgcttcgctttcgcgacgctacggccgaggaagacttcaccctcttcttccgcatacagcagcggaccgagtttgtcggagaagccccactgggtcaccatgttacgcgccaggttcgtcgccactttaatatcgttggacgcaccggtagaaacatgttccggaccgtagataatctcttccgccagacgaccgccgtacagggtggagatctggctttccagtttctgacggctggcgctgattgcatcgccttccggcaggaagaaggtcacacccagcgcacgaccgcgcgggataatcgtcactttgtgcaccggatcgtgctccggcaccaggcgaccaataatcgcgtggcccgcttcatgataagcagtagactctttctgcgcttccgtcatcaccatggagcgacgttccgcacccatcatgattttgtctttcgctttctcgaactcaaccatcgacacaacgcgtttgttaccgcgggcagcaaacagcgccgcttcgttgaccaggttggccagatccgcaccggagaagcccggggtaccgcgcgcaatgattgccgcatcgatatccggcgccagcggaacgcgacgcatatgcactttcaggatctgctcacgaccgcgaacatccggcaggccaaccaccacctggcggtcaaaacggcccggacgcaacagcgcggggtcaagaacgtccggacggttagtcgccgcgataacgatgataccttcgttaccttcgaagccgtccatctcaaccagcatctggttcagggtctgctcacgttcatcgtgaccaccgcccaggcctgcgccacgctggcggccgacggcgtcgatttcatcgatgaagatgatgcaaggcgcggctttcttagcctgttcgaacatgtcacgcacacgagaagcgcccacaccgacgaacatttcgacgaagtcagaaccggaaatggtaaagaacggtaccttcgcttcaccagcgatcgctttcgccagcagcgttttaccggtacccggagggccgaccatcaggacgcctttcgggattttaccgcccagtttctggaagcggctcggctcacgcaggtattctaccagctcgccgacttcctctttcgcttcgtcacacccggcaacgtctgcaaaagtggttttgatctggtcttccgtcaacatacgggctttgcttttgccgaaggacatcgcgcccttcccgccgccgccctgcatttgccgcataaagaagatccagacgccgatcagcagcagcattgggaaccaggagatgaagatggaagccagcaggctcggctcttctggtggttcgccaacaactttgacgtttttagtcaacaggttatcgagcagcttcggatcgttaaccggaatgtaagtcgtgtaacggttactatctttcttggtaacgttgatctcacgtccgttgatacgcgcttcgcgaacctggtcctgattgacctcttgcaggaaggtagaataatccaccttgcggccattcgactcgctgggcccaaagctctggaatactgacatcagcacaacggcaatgaccagccagagtattaggtttttcgccatgtcactcaagggattaacctcttattacaactgtgttaaaaacagcgtcaggatactctatatccagtttctttcaaactttcgtttgaaatctgccggttatggtttacgcccggtcgctacaatatacacttcacgcgaacgagcgcgggaagagtccggcttacgaactttgaccttcgtaaacagggagcgaatttctcgaagatactcatcgaagccttcgccctggaacaccttcactacaaaactaccacctggcgctaatacatcacgagacatttcaagcgccagttctaccagatacatagcccggggaatatccaccgccggtgttccgcacatattcggcgccatatcggacatgacaacttggactttactgtcgcccactcgctcaagtaacgctttcaggactaattcatcacgaaaatcgccctgaaggaagtccacaccaacgattggatccattggtaaaagatcgcaagcgatgatgcggccgctgttgccgatctgcgtgaccgcatactgcgaccagccaccgggagcagcaccgaggtcgactaccgtcatccccggcttaaaaattttgtcactttgctgtatttcatcaagtttaaaccaggcacgggaacgtaacccctttttctgtgcctgttgaacatatttatcgctaaagtgttcctgaagccagcggcttgagctggcagaacgctttttacctgtcatttaacattcccgttcgggttcatcgtactttactgcgtaaaaatcgacgcggtagtttggcgatatatgggagatggcggtagaatgacccgttttcaatcccaacgtaagcaaaaaaatacgatgaatctgagtactaaacaaaaacagcacctgaaaggtctggcacatccgctcaagccggtagttatgcttggcaacaatggtttgaccgaaggggtactggccgagatcgaacaagcgttagggcaccatgaactcatcaaggtgaagatcgcctcagaagatcgcgaaacaaaagccttgatcgtggaagccatcgtacgcgaaaccggcgcctgtaacgtacaggtcatcggtaaaacgctggttctgtaccgcccaacaccagagcgtaaaatctcgctgccacgctaagaatatcctgaatctcgacacaactttgtgtaaaacgagggatttctgcggccaggcgagcaaaatgccatgctcctgacgttgataaaaggccgctatgcggcctttttcctttctttacaatctataaacatcgtagcgggaaatacgccttacaggtattcaaccttggtaatttcgtattccacttccccacccggggtacggatagtcacgacgtcatcctgctctttgccgatcagaccgcgggcgatcggcgagttcacggagatcagattctgcttaaaatcagcttcgtcatcgcccacgatgcggtaggtctgttcctcgtcggtatcgaggttcagcacgctgacggtagaaccaaaaatcacccggccgttgttcggcattttggtgatatcgataacctgcgcattagacagcttcgcttcgatatccttgatacgcccttcgcagaaaccctgctgctcacgcgcggcgtgatactcggcattctctttcagatcgccgtgttcacgggcctcagcaatagcggcaatgatttcaggacgacgcacagacttcagataatccagttcttcgcgcagtttttcagcgccacgtaaggtcatcggaatcgcttgcattagttatacctctttatcattccttcagggaacggatagctccgctccgccacctgtcctgcccacgggcaggacacgagcaaaaagaaaccgacccgggaaacactccccaggtcagcagcaatttttcatttgatgggtattttaccccgaagttcattatgggtcatcgtttactttactgggcgttgcaccgtagtatgacggcctggcttcaggttgttagcgcgagattatgcgatttcccagatttatcatcggattgaccgccggtatagcgcttagcgctcaggcggcgaatattgacgagtacatcaaccagcttcccgccggtgcgaaccttgcctttatggcgcaaaaggtcggcgcatcgacgccggaaatcgactatcacagccagcaaatggcgctcccggccagtacgcaaaaggtcatcaccgcgctggcggcactgctgcaactggggcccgattttcgctttaccaccacgctggaaaccaaaggttcccttgacggcggcgtgctgaaaggcgacctgattgcgcgcttcggcggcgatccgacgcttaaacggcaggatattcgcaatatggtggcgacgctgaaaaaagccggcgtgcagcgtatcgaaggcaatgtgctcatcgatacctcggtcttcgccagccatgacaaagcgcccggctggccgtggaacgacctgacgcagtgcttcagcgccccgccggcggcggcgattgtcgaccgtaactgcttctctgtctcgctgtatagcgcgcagaaaccgggcgatgtcgccttcattcgcgttgcatcctattatccggtcaccatgttcagccaggtgcgaacgctagcgcgtggctcatcggaagcccagtattgcgagctcgacgtggtgccgggcgatctcaatcgctatactctcaccggctgcctgccgcagcgtagcgagccgctgcctctggccttcgccattcaggatggcgccagctatgccggagcgatcctcaaagcggagctggcccaggcgggaatcacctacagcggcacgctgctccgccagacgctggccaatgagcccggcaccgtgctggcaaccagccagtcggctccgctgcacgatctgctgcggatcatgctgaagaagtcagacaacatgattgccgacaccgtctttcgcaccatcggccacgcccggttcggcgtacctggcacctggcgggcgggctccgatgccgtacggcagatcctgcgtcaacaggctggggtcgatctcggcaacactatcatcgccgacggctctggcctgtcgcgccacaacctgatcgccccggcgaccatgatgcaggtgctgcagtatatcgcccagcacgataccgagctcaacttcatctccatgctgccgctggcgggccatgacggatcgctgcagtatcgcgccggtcttcatcaggcgggcgtcgatggtaaagtttcggcgaaaaccgggtcgctccagggggtttataacctcgcaggcttcatcactaccgccagcggacaaaagatggccttcgtgcaatatctctccggatacgccgtggagccagctgatcagcgcaatcgccgcatcccactggtccgctttgaaagccgcttgtataaagatttgtaccagaacaattaaaacaaaagggccgcatcagatgcggccctttttgatccagagaagtcaggattagcgtttgtagatgaattcgacgccttcttcgtcgtcctcatcccagtcgtcatcccagtcttcgtcatcttctgcttcggcttcggcctcttcaagctgctgacggtgatagtcgtcccacataaactcgactttctccggcttctgctcttcttccgcctgcacgatcgggttttcgatgatgaaggtcatcacgtcccagcatagctctttcacgccctgctggctggccgcggagatcaggtagaatttctcttcccaacccagcgcttcggcaatcgctttggctttggcttcggcttcggccttgtccatcaggtcaatcttgttgaaaactaaccagcgtggtttggaggctagcttctcgctgtatttctccagctcgccgatgataatgcgcgcattctcaaccggatcggagccgtcgatcggatcgatatcgatgaggtgcagcagtacgcggcagcgctcgaggtgcttgaggaagcggataccgaggcctgccccttccgctgcgccttcaatcagccccgggatatcggcaactacgaagctcttttcattgtccatacgcaccacgcccaggcttggcaccagggtggtaaacggatagtcagccactttcggcttggcggcggagaccgcacggatgaaggtggatttgccggcgttcggcatgcccagcatcccgacatcggccaacagcatcagctccagctgcaggtcgcgtttatcacccggggtacccatggttttctgacgcggcgtacggttaacggacgatttgaaacgggtgttgcccaaaccgtgccagccgcctttcgccaccatcagacgctgaccgtgtttggtcatatcgcccatggtctcgccggtgccctgatcgataacccgggtgccgaccggcacttttaccgtcacgtctttaccgcgcttaccggtacagtcgcggctttgaccattctgcccacgttcggcgcggaacgatttttcaaaacggtagtcgatcagggtgttcaggttctcgtccgcttccagccagacatcgccgccatcaccgccatcgccgccgtccggaccgcctttcggaatatacttttcgcggcggaagcttacgcaaccattgccgccgtcacctgctacgaccaggatcgttgcttcatctacaaacttcattttactctccgtaaatcattcgcctgagcggggcagcggtactaccgcctctcgcttacgccaacgtccccaaagacgatgaccgatggcggaatacatcgcgcccgcaaccacgacaaacgcaccgagataaccaatcaggtttaacatcggtctggcgaaaacatcgggccaggccattgataataaatcagaaaacagtagcgtaaacagtggcgtcaaggtgattaacgcgctgacctgcgccgcctgccagcgcgccatggcttccgccagcgccccgtagccgaccagggtattcagcccgcaaaaaatcaggcatgccaattgccaactgcttaaccgggaaatcactccgggctcagcaagcggcagtaatgcaatcgtacacaaagtgtacagcaaaaatagtatctgctgtgatgccagacggcgcaataacaccttttgcgcgacgccgtagcttacccacaccgtagcggcagcaacgccgaaaattacccccacgtgtagtccgtcaggcgggtaaagatttcaatcagactggtattgaagaacatcaccagcccgcagagcagcatcaacgcgcccaccacctgggtgccgcgcatgcgctctttcagaattacgacgctagccaccatcatccccaccggcgatagctggccgatgacctgagaagccgtggggctgaggtattgcagggaagaactaaacaggatgaagttaccgaacagaccgccggtggcaatcgctaataacaccagccagcgcggcttgcgaaaaattcgcatcggcggcagtttgcctttgatcgcgaggatcgcgccaagcccaatgctggccatcaggaagcgataaaagaccaccgtaggcggcgccatcacctcgagaacctgtttcattgcaatcggcaacgctccccaacacattgcggtggtaagcgccagaataatgccaatcccagcctgctgcttcatgcctgtttccctgcaaaaattttccggtagacgaatgtaaaaagccccgcaacgtgttgcggggctttcatccgttaccgggacgcgaaaaacttattcagcaacgatgctgatgaatttacggtttttcgggcctttaacttcgaacttgactttaccgtcagtcaaagcgaacagagtgtggtcacggccgcaaccaacgttggtaccagcgtggaatttagtaccacgttgacgaacgatgatgctacctgccagaactgcttcaccgccgaaacgttttacgcccagacgtttagcttctgaatcgcgaccgttacgagtcgagccgccagcctttttatgtgccatttaaatctactcctcaggtcttaggcgctgatgccagtgattttcacatcagtgaaccactgacgatggccctgctgcttacgatagtgtttacgacgacgaaacttaacgattttaactttctcgccacgaccgtgagcaacaacttcagctttgattacgccgccctcaacgaaaggaacgccgatcttgatttcttcaccgtttgcgatcatcagcacttcagcgaattcaacagcttcgccagttgcgatgtccagcttttccaggcgaacggtctgaccttcgcttactcggtgttgtttaccaccactttggaaaaccgcgtacatataaaactccgcttccgcgcacctctttatgtgattcagagtgcgctataaatattcacaatagggcgcgaatattacgcaaaacgcgagcctttgacaagagcgattagcgatcaatgcagaaaaaaaacacaactttcacgacaacgtttatctacggcaatttttcagtacaatcatatcttcttttaattctgtcttaatccttctgtgatcccacctggattcatggtaacaggacatttggcccggcttttgcgatgaatttagaaaaaatcaatgagttaaccgcgcaagatatggcgggtgtcaatgcgacgattcttgagcaactcaactccgatgttcagcttatcaatcagttaggctattacatcgtcagcggcggcggcaaacgcattcgcccgatgattgctgtgctcgccgcacgcgcggtgggctatcaggggagcgcgcatgtcaccattgccgcgctgattgaatttattcataccgccaccctgctgcatgacgacgtcgtcgatgagtctgatatgcgtcgcggcaaagccacggccaatgcggcgtttggcaatgccgccagcgtgctggtcggcgattttatctatacccgcgcctttcagatgatgacccagctgggctcgctgaagatccttgaggtcatgtcggaagcggtgaacgtcattgccgaaggcgaagtgctgcagctgatgaacgtcaatgacccggatatcaccgaagagaactacatgcgcgttatctacagtaagacggcgcgcctgtttgaagctgcctcgcagtgtgcgggactgctggccgactgcactgcggaagaagagcgcgcgttgcaggattatggccgctatctcggcaccgctttccagctaatcgacgatttactcgattatagctctgacggcgagcggctcggtaaaaacgtcggtgacgacctgaacgaaggtaaacccacgctaccgctgctgcacgccatgcaccatggcacacccgatcaatcagcgatgatccgcggtgcgatcgagcaaggcaacggccgccatctactggatgctgtgctggaaacgatggcgacctgcggttcgctggaatggacgcagaagcgtgccgaagacgaagctgacaaagccattgccgcgctgcagatcctcccggacacgccctggcgcgaagccttgattgggctggcgcatattgcagtccagcgcgatcattaatcccccctcctttcccgcgcgacgcgcgggaaagttccagtaaaatgccatttctctccctaaacttccgaatatcttgatagattctgaatattccggcgctttaacagaacttgttagaaccctacatagtacgcgggtatagtgtctctatcgcccatgtgggacgatctggacctttaacaccaggagaatttatggataagttcatcgactggcatcccgcagatattgttgcgggattacgtaaacggggaacatcgctggcggcagagtcgcgacggcacggactaagttcttcaacgctggcgaacgccctgacccgcccctggccgaaaggcgaattgattatcgccacagcgctggaaacgcagccgtgggtcatctggccgtcacgctaccacgacccggtgactcatgagtttatcgacagaacgcagatgatgcgtcagaagaagatcgacaagtgatgtgattgctcgacagcgccccggaacaacgtcccggggcgctgtcaggacgcggttactcgcccttcacgcgttgaatattggcgcccagggcctgcagtttatcttcgatacgctcatagccgcgatcgatatgatagatgcgatcgacgatggtggtcccttcagcgatacagccggccagcaccaggctcgccgacgcgcgcaaatcggtcgccatcacctgcgcgccagaaagctgcttaacgccgtgacagatagcggtattgctctcgatctccgcgtgcgcgcccatacggatcagctccggaatgtgcatgaagcggttttcaaagatcgtttcggtgatcacgccggtcccttccgctaccaggttaagcagcgtgaactgggcctgcatatcggtcgggaagcccgggtgcggcgcggtacgcacgttgaccgctttcggacggttgccgtgcatatcgaggctgatccagtcttcgcccgtttcgatgtcagccccggcgtcgcgcagcttcgccagtacggcatccagggtatccggctgcgcgttacggcagaggatcttgccgccggaaatcgccgcggccaccaggaaagtcccggtttcaatacggtcaggcagcacacggtagacgccgccgcccaggcgctgcacgccttcgatggtaatgcgatcgctaccctggcctgtgatttttgcgcccagcgcgttcaggaagttggcggtatcgacaatctccggctcgcgagcggcgttttcaataatcgtcgttccctccgcaagcgtcgctgcgctcatgatggttacggtggcgccgacgctcaccttatccatcacaatatgcgcgcctttcaggcgaccgctgaccgaggctttgacataaccttcttccagtttgatctcggcgcctagctgctccagaccactaatatgcagatcgaccggacgcgcgccgatagcgcagccgccaggcagagaaacttgaccctgaccgaaacgcgccaccaacgggcccagcgcccagatagaggcgcgcatggttttcaccagatcgtacggagcacagaatacatcgaccgggccggcgtcaatccataccgaaccattgcgctcgaccttcgcgcccagctggctcagcagcttcatggtggtatcgatgtctttcagcttaggtacgttttggatctctaccggctcttcggcaagcagcgcggaaaagaggattggcagggcggcgttttttgccccggagatggtgacttcaccctgaaggcgagtcggcccctgaacacggaatttatccattgattctgttctctattaaaaattcacatacgctgcaggggatcccccacagcttagaagccattgagtttgcggtctcgcgcccactcctgcggagtaaaggccttgatcgacagcgcatggatgcggttgtcggcaatatattccatcagcggcgcgtagatgctctgctgctttttcacccgactcatgccatcgaacatctcacccacagcaataacctgaaagtggctgccatcgccagagacgtggacttcctggagggggagtgcgttcatcagcacggtctgaatttcatgattttccatgggctcaaatttatctgatagtgaaaacagcccaacatcttagaggaaagtggcgcggtcttaaacaagcaaaaagccccggcgaaaagattgccagggctttcggaatagcttcagtgctaaggcactgaaaagattatgagatcagatcggcaggcaggttgtaaagaccgatcagcgtttgcaggttttcgctcttgccgaccagctgcgcttcccggccctgacggcgaatcagcgccacaaaatgcactaacagcgccaggcccgcagtgtccacgcgcgtggtctgactgagatcgatgatcgccgttcccgccgtcgcctgggcgcgcgcctcccagagcgggaccagcagatcctgatccagctccccgtgcagcgccagcgtctcgccctcgctagtccagctcagctgcccgctcattattttttctgttccagggtgatcggctgcgcagagatcgctttcagctgcgcggtcaggccatcaacgcccttggtgcgcagcagatcgctccactcattctgtttggtggtgatcatgctcaccccttccgcgatcatatcgtaggcctgccagttgccggtctgggtatttttacgccactggaagtcaagacgtaccggcggacgaccgttcgggtcgatgatagtgacgcggatcggaacgatggttgcgctgcccagcggctgctccggagcaatctggtaagtctgcccatggtacatcgccagcgcctgaccgtaggcctgcttcaggtattcacggaaggcggcaaaataggcctcacgctgcgcaggggtcgcttctttgtaatagcggcccagcaccagcgcgccggcatatttcacctgtacatacggcaataactcctggtcgacgatgtcgcgcagatagttaggattagctttaatcttcggctgttcattcttcaggcgatcgaaggttttctgcgccgcttcattcatcagcttatacggattggactgatctgcggcctggacggcggtcagcggggcaatcaccagcatggcgaccatgagtaagcgtttaaacatatcgtatttctcctgaaattaatgcgtcgtgccggctgccggcgtcgcgtcagtatgaccttctgcctcggccttatcattgccagaattctgattgtcgccgcccttactgttataaaggaactgaccaatcagatcttccagcaccatggcggacttggtgtcctggatagtgccgccgtctttaaggatagtcgtcccgaggtccgggtcttcaaaaccgacgttcagcgccaggtactgctcgcccagcaggccagaggtgcggatcgccaacgaactggtatccgggatatggttgtagcgctcatcgatatcgagctccacgcgtggcagataggttttcggatcgagcgtaatgtccgctacccgccccactaccacgccgccgatgcgcaccggcgagcgcgccttcaggccgccgatgttatcgaaagtcgcataaaggcgataagtcggctcggtgcgtagcgaggtgacgttcgccgccttcaggcagacaaacagcgccgccagcagcgccaccagtaagaacacccctacccagatttcagtttttttcgtttgcatgaactcaattcccaaacatcagcgcagtcagcacaaaatccagccccagaaccgccagcgacgcatgcaccacggtacgcgttgtcgcccggctaatcccggcggaagtggggatagcgtcataaccattaaataacgcaatccaggttaccgtaatagcgaacaccagactcttaatcaggcagttcaccagatccattcgccagtcgacggcattttgcatcgcggtccagaaaaaaccaccgtcaatgcctttccagctcacccccaccagcgcaccgccccagatccctaccgcgacgaagataatcgtcagcagcggcagcgaaatgacaccggcccagaagcgtggggaaatgacgcgacgcagcggatccaccgccatcatctccatactggagagctgttccgtggcccgcatcaggccaatctcggcggtcagcgccgacccggcgcggccggcaaacagcagcgcggcgaccaccggccccagctcacgcagcagcgacagcgccaccagcatgccaagactggtctctgcgctgtaggtggttaacaccagatacccctgcagcccgagcaccataccgataaacaagcccgatacaatgataatcagcatcgacaggacgccgacgttatagagttgacgaaccagcagcggcgcgtgcttgcgaaactctggtttgccgacaacggcgttgaaaagcattaatccggcgcgtccaaacgtcgcggtggttttaataccgcgatgacctagcgcggccagcgcattaaacagcatgagtcgctcaactccctatgcctaataaatcatggtgatagtcgccagcaggataacggaacggcaccggaccgtcggcaataccatcaatgaactgacgaacccgaggatcggtattctcccgtagcgactgggcgctaccgtgggcgacaatctttttatccgccacgatatacgcgtagtccgcgatgctaagcacctcgggcacatcgtgcgaaaccacgatgcaagtgacacccagcgtgctgttgagttcagaaatcagcttcaccagcacgcccatagtgatgggatcctgcccgacgaacggttcgtcgaacataatcagatccggctccagggcaatggctctcgccagggcggcgcggcgcgccatcccaccggaaagctcagaaggcattaacttcgccgcaccgcgtagccccaccgcttccagcttcatcatcaccgtcgtatgcagcagcgcaggcggcaaatgcgtatgttcgcgcagcggataggcaacgttgtcaaagacattgagatcggtgaacagcgcgccggactggaacagcatgctcatccgcttacgcaccgtataaagacgcgaacgcgtcatctgcggcacgttctcgccatcaaacaggatctctcccctgtccggcgggatctggccgccgatcaggcgtaacagggtagtcttgccgatccccgaaggtcccatgatcgcagtaattttaccgcgcggcaccgacagcgagatgtcgtcgaagatcacacgatcgccgcgtgaaaagcggataccgcgcacttcaactaaattcgcctgagtttggctcataaaatcatccttactaaacacctgacgggcaagcatggccctttcttgcgccacaatcacaacatttttacagaatcttacctgcacaggttagcgaaagctggcatttgttttacttttggcacacataaagtcaaaattaagaattcgttacgctgcgtagggataacccagcgaggcgacgattatacctgaagaaaggactttagatgctcttagcgacggctctgttaattattggtttattgctggttgtctacagcgccgatcgtctggtctatgccgcctccatcctgtgtcgtatgttggggatcccgccgctgatcatcggcatgacagtggtcagtatcggcaccagcctgcctgagatcatggtcgccaccgcggcctcgctgcacgggcagaccgatctggcggtcggcaccgcgctcggatctaatatcaccaatatcttattgatcctcggtctcgccgccttactcaggccatttaccgtgcattctgatattctgcgccgcgaattaccgctaatgttgctggtcagcgtgctggcgggactggtgctctacgatggacaactgacccgtctcgacgggctatttttactggcgttagcgcttctgtggctgctgttcaccatcaaaatcgctcgcctggcggagcgccagggaagcgatagcctgacccgcgaacagctggcggagctgccacgcgaagggtcgctgccggtcgccctgctctggttaggggtagcgatgatcgtcatgccgatggcgacccgcatggtggtggataacagtacagtgctggcaaactatttcgccatcagcgaactgaccgtcggcctgacggtggtggcgataggcaccagcctgccggagctggccaccgccatcgccggggcgcggaaaggggaagatgatattgccatcggcaatatcatcggcgccaatatccttaatatcgcactggtgctgggtttaccggcgctgatcgcgccggggagctttgcgaccgaagccttcactcgcgattatggcgtgatgctgctggtcagcctgatcttcgcagtgctgtgctggcgccgtcagcagcagccgggacgactggttggcgcgctgctggtcggcggctttgtggtttggttggcgatgctgttttggacagcaccgctcttcgttgaatgattcgggataacatcatgtcgcaaatagatttgcccacggattttgactttcaacaggcaggccgtcaggtgctggaaattgaacgtgaaggtctggcccagctcgatcaatacataaatgaagactttacccatgcctgcgaaacgattttccgctgcggcgggaaagtcgtggtgatggggatgggcaaatccggccacatcggccgcaaaatggcggcaaccttcgccagtaccggcacctcggcattttttgtccaccccggcgaagcggcgcacggtgatttaggtatggtcacgccgcaggatgtggtaattgcgctgtcgaactccggcgaatcgaatgaaatcctcgcgctgatcccggtcctcaagcgccagcaggtgaagcttatctgtatcaccagccggccggagagcagcatggcgcgcgcggcggatatccatctgtgcgtgaaagtgccgaaggaggcctgcccgttaggactggcgcccacgtcgagcaccaccgccgcgctggtgatgggtgatgccctcgccgtcgccctgctggaagcccgcggctttaccgctgaggatttcgccctgtcgcatccgggcggcgcactcggccgtaagctgttgctgcgggtcaatgatattatgcataccggtgatgaaatcccgcacgtcggcctgcaggcgaccctgcgcgatgcgctgctggaaatcacgcgtaaaaatttaggcatgaccgctatctgcgatgacgatatgaacatcatcggtatttttaccgacggtgacctgcgccgggtcttcgataccggcgttgatatgcgcgatgccagcattgccgacgtcatgacccggggaggtatccgcatccgccccggcactctggcggtggatgcgttaaacctgatgcaatcccgtcatatcacctgcgtgctggttgccgatggcgaccatctgctgggtgtggtacatatgcacgatctgctgcgcgcgggcgtagtgtaagtaaggaaaaaataatgaataatgctgatgctcagttagcgacctgctacgggccggtaagccaggcgtttgtcgatcgcgcggcgaagatccgtctactgatccttgatgtcgacggtgtattatccgacgggcttatctatatgggtaatcacggcgaggagctgaaagcgtttaacgtccgcgatggctatggtatccgctgcgcgctgacctcgggtattgaagtggcgattattaccgggcgaaaagctaaactggtagaagatcgctgtcagacgctgggcattacgcatttgtaccaggggcagtcggacaagctgctggcgttccgcgatctgacggacaaactgcacgtgcggccggaagaagtcgcctacatcggcgacgatcttattgactggccggtgatggccgaagtgggccttagcgtcgccgtcgccgatgcgcatccgctgctgctaccgcgggcgaattatgtcacgcgaattaacggcggacgcggcgcggtacgcgaagtctgcgatttgttactattggcgcagggcaagctggatgaggccaaagggcaatcaatatgagtaaaaccagacgttgggttatcattttactgtcgctgctcgcgctgatccttatcggcctgaatctggcgaatacggacgacacggcccagccggaggtcaatcctaacgaccctacgtataaaagcgaacataccgacaccgtggtatacagtccggaaggcgccctgagctatcggctgattgccgagcacgtggaatatttttccgatcaggaggtctcctggtttaccaaaccggtgatgaccacctttgatactaacaaggtgcctacctggtcggtcagagcagacaaagcgaagctgacgaatgaccggatgctctatctttacgggcacgttgaggtgaatgcgctcgctccagattctcaactgcgcaaaattacgacggataacgcccagataaatctggtaacgcaggacgttacctccgatgacatggtgacgttatacggcaccacatttaattccagcggcctgaaaatgcgtggaaaccttcgcagcaaaaatgccgagctgattgaaaaggtgagaacctcttatgaaattcagaacaaacaaactcagccttaagattgcgctcgccggcgcgttactggccgccagcctgccggccctcgccaagacgggcgataccgatcagccgatccatatcgagtccgatcagcagtcgctggacatgcagggcaatgtcgtcaccttcaccggtaacgtggtcgtgacccaggggacgatcaagattaacgctgataaagtggtggtcacccgtccgggcaacgagaaaggcaaagaggtgatcgaaggtttcggtaacccggctactttctatcagatgcaggataacggcaagccggtaaaaggccgggcgtcgaaaatgcgctacgagctgcagaacgattacgtcgtgctgacgggcaacgcttatctggaacagctcgacagcaacatcaagggcgacaagatcacctatctggtgaaagagcaaaaaatgcaggccttcagcgacaaaggtcgacgcgtcaccaccgttctggtgccgtccgagctgcaggacaaaagcggcaaccagcaaaagaagagtaactaatccgttatggcaaccttaactgcgaagaatctcgctaaagcgtataaaggccgccgcgtggtggaagatgtcagtctcaccgttaactcgggcgagattgtcggcttgctcggcccgaacggcgccggtaaaacgaccaccttctacatggtggtcgggattgtgccccgcgacgcaggcaatatcatcatcgatgacgaagacatcagcctgctaccgctgcacgcgcgcgcgcgacggggcatcggctacctgccgcaggaagcgtcgattttccgtcgcctcagcgtctatgacaacctgatggcggtcctgcagatccgtgacgatctaaccagcgaacaacgggaagatcgcgctaaagagctgatggaagagtttcatattgagcacctgcgcgacagcctcggtcaggcgctctccggtggtgaacgccgccgcgtcgaaatcgcccgcgcgctggcggcgaatccgaaatttattcttctagatgaaccctttgccggcgtggatccgatctccgttatcgatattaaacgcatcattgagcacctgcgcgacagcggtctcggcgttctgattaccgaccataacgtccgtgagaccctcgcggtctgcgaacgcgcgtatattgtcagtcagggacaccttatcgctcatggtacaccgcagcagatcctcgaagatgagcaggttaagcgcgtgtatcttggggaagacttcagactctgatagggtagaggttacagacgttttagccggagatatttaccctgaacatgaagcaaggtttgcaattaaggcttagccaacagcttgccatgacgccgcagctgcagcaggcgattcgtttgctgcagttgtccacgttagaactccagcaagagctccagcaagcgctggaaagtaacccgttgcttgagcaaaccgatcttcacgacgaggtagaggcaaaagaggtggaggaccgcgagtccctcgataccgtcgatgcgcttgagcaaaaagagatgcccgacgaactgcctctcgatgccagctgggatgaaatctataccgctggcacgccgtcgggtaacggcgtcgactatcaggacgacgagcttccagtctatcaaggcgagaccacccagacgctgcaggactatctgatgtggcaggttgagctgacgcctttcaccgacaccgaccgcgctattgccacctctatcgtcgacgccgtcgacgatacgggctacctcacgattcagattgaagatattgtcgacagcatcggcgatgacgagatcggcctggaggaggtggaagcggtcctcaagcgaatccagcgttttgatccggttggcgtcgcagcgaaagatctgcgcgactgcctgctgatccagctgtcgcaatttgctaaagagacgccgtggctggaagaggcgcggctgattatcagcgaccatcttgatctgctggccaaccatgatttccgcactctaatgcgagtcacccgcctgaaagaagaggtgcttaaagaggcggtcaacctaatccagtccctggatcctcgccctggccagtccattcagaccagcgaaccggaatatgtcatcccggatgtgctggtgcgcaaggtgagcggccgctggaccgtcgagctcaacgccgacagcattccacggttgaaaataaatcagcagtatgcggcaatgggcaacagcgcccgcaatgacgccgacggccagttcattcgcagcaatctgcaggaagcccgctggctgattaaaagtctggaaagccgcaacgataccctgctgcgcgtcagccgctgcatcgtagagcagcagcaggcttttttcgaacagggtgaagagtatatgaagccgatggtgctggctgatatcgcccaggccgtcgagatgcatgaatcgacgatttcccgtgtcaccacgcaaaaatatctgcacagtccgcgcggtatttttgaactgaagtatttcttctccagccatgtgaataccgaaggcggaggcgaagcctcgtcgacggcgattcgcgcgctggtgaagaagctcatcgccgcggaaaaccccgcgaagccgttgagcgacagtaagctcacctccatgctgtccgagcagggtattatggtggcgcgccgcactgtcgcgaagtacagagagtctttatccatcccgccgtcaaaccagcgtaaacaactggtctgacataaccgataaggaagacactatgcagctcaacattacaggacacaacgtcgaaattacgcctgcgatgcgcgaattcgttacggcgaagttcagcaagctggagcaatttttcgaccggatcaatcaggtctatattgtgttaaaagtagagaaagtgacgcaaattgcggacgcgaatctgcatgtcaacggtggcgaaatccatgccagtgcggaagggcaggatatgtatgcggctgtcgatggtcttatcgacaagctggcaagacagttaacgaagcacaaagataaactaaaacaacactaattgtccgggcccccttgcgcccgccgctggatatcatcggcgacgggcgcgggggcgctcaggtgaaattatgatgaacaacgattcggctctacaactgagcaacgtcctgaaccaggaatgtacccgtagccaggtgcactgccagagcaagaagcgtgctctggaaatcatcagcgaactggccgccaaacagttaagtttgccgccgcaggtggtgttcgaagcgatcctcacccgcgaaaaaatgggcagtaccgggatcggcaatggtatcgccattccccacggaaaactggaagaggatacgctgcgtgctgtcggcgtttttgtccagctggaaacccccatcgccttcgacgcgatcgacaatcaacctgtcgacctgctgttcgcgctgctggtgccggccgaccagacaaaaactcacctgcatacgctctccctggtggccaaacggctggcggacaaagcgatttgtcgtcgcctgcgcacggcgcagagcgatgaagagttgtatgagatcatcaccgaagcaggaagcagcgatgacgcataacggcagtcgcaccttatcctttatcgtactgaggagaaacggtacatggtactgatgatcgtcagcggccgctcgggctcggggaaatccgtcgctctgcgagcgctggaagatatgggcttttactgcgtggataacctgccggtcgtgctgctgcccgacctggcgcggtcgctggctgaccgtaatatctccgcggccgtcagcatcgacgtgcgtaacatgccggaatccccggagatcttcgagcaggcgatgcagaatctgccggaatgtttttctccgcagctgctgttccttgatgccgaccgcaataccctgatccgccggtacagcgatacccgtcgcctgcacccgctctccagcaagaatctgtcgctggaaagcgccatcgacgaagagagcgatctgctggagcccctgcgctcccgcgccgatctgatcgtcgatacgtcggaaatgtcggtgcatgagctggccgagatgctgcgtacccgactgctgggtaaacgcgagcgtgaactgacgatggtcttcgaatccttcggcttcaagcacggtattccgatcgatgccgattacgtctttgacgtgcgctttctgcccaacccgcactgggatccgaaactgcgtccaatgaccggtctggataaaccagtggccgccttcctcgatcggcacactgaagtgcacaactttatttatcagacccgaagctatcttgagctatggttaccgatgctggagaccaacaatcgcagctatctgacggtggccattggctgtaccggcggtaaacatcgttcggtttatattgctgaacaactggctgactacttccgctcgcgcggcaagaacgtgcagtctcgtcatcggacgctggaaaaacgtaaatcatgaccgtaaagcagaccgttgaaatcaccaataagctgggcatgcacgcccgcccggcgatgaagctgttcgaactgatgcagaatttcgatgccgaagtactgctgcgcaacgatgaaggcacggaggcggaagccaacagcgtgattgccctgctgatgctggactcggcgaaagggcgacagatagaggtggaggccagcggtccgcaggaagttgaagccctcgccgcggtgattgccctgtttaacgctggctttgacgaagactaaacgtgacgcttcccggcgacggacgactggcgattgtaccagccccggcgccggagtaacccgctaatagagcttatgctcgcgcatgaacccttccccgcccagctgtcgcatctggcgtaagatccaggcctgacgactgcgcacatagcctgacggcgcatcggcgcgatagcggatcgggttcggcagcaccgcggccagcagagccgcttcccccggcgtcagctgactggcgggtttatgaaaatagcgctgggcggccgcttccacaccaaatatcccatcgccgaactcggcaatattcaggtagacggtcaggatccgctttttactccacacggtttcgatcccgacagtcagcccggcttccagccccttacgcagccagctgcggccatcccataaaaacaggtttttcgccgtctgctgcgacagcgttgacgcgccgcgaatccgggtatcatgccgctcattgtgcgccagcgctttctcaatcgccgacacgtcgaacccccagtgttccgggaacttctgatcttcggcggcaatcaccgccagccccatccatggggagatcttatccatggcaacccagtcggaatgcgccagataatggaaatcaccggacagccaggcgctcacctgccgctcaagcatcaccgccgaaaacggcaccggcagcacgctaaacagcgcgatccccccgccccagaggacggcggcgatcagcagcagacgcaatgccagacgtttcagcagcgcaaagggcgcaacgcggagcctcatgcgctcagcgccagcacgcgggccaccagcttctcaattccggtggcggcttgcgcaatgtcctccgccagcatatacgccggagtggtgaccactttgttgtcttcatccaccacgatgtcgtcgaccgggcaaggcacgtgctctgcccccatctcttccaccacatcggcggtatcaagatcggtcccaatggtcatccgcagcggaaacgcaaagatcttcggcagcatcgccggggcaatgcacataaagcccagcggcttgccggcctgatgcatcgccagcgccagggcccgcagatcgggatccacctggcattcgctgccctcggcggcgaagctgcttagatttttcgccgcgccgaagccgccagggacgatcagcgcgtccagcgtctccgcacgcgcctgcgccagcggcaggatgtcgccgcgggcgatacgcgctgcttccaccagcacattgcgctgctctggcatcgcctccccggtcagatggttgatgacatcgcgctgcggtttatcgggcgcaaagcacactgcctgcgcgccgttgcgcgcgatcgccagcagggtaatcaccgcctcatggatttcactgccgtcgtacacgccgcagccgcccagtaccacaccaatttttttcatcgctttcgctcctccatgcaactcgctgaaaccagtcaaaaatgtcgattaactcgctatgcttcacatattttactgattcatgtaacaaattagttaagctttgctatcttaatgagcgagcaatccacttcttcggttgcgccacgtaacaacatcactcaaacaacactggctcaaccaccagttccctggtgttggcgcagtattcgcgcaccccggtctgtccggggtcattttttgctggctttcgccacccacgccttcagtaccgctacatcgttttgccactcggatttcatctcttcaacccattcagcgacattatcagaccaggcaggcagatccggagtctggatctgctggcccagctgctggatgtggcgcagtccgatagaaccggccgcccctttgatcttatgcccctcttcgacaatccctttttggtcgcgggcggtcagattagactccagaacggacatgtagcccggcatcatcttctcaaacaccgcgagaccatcgttgataagcttcggtcccaccagctcgatatattgctccagcatatcggtatccagcaccgcgtcggctttatgcagatcggccgccggcgcttcctgcgcttcctcatccggtgcatcccagaatttcttgatcatggccgttagcgctggcaccgatagcggcttactcaacacatcgtccatcccggcgtcgagatactcttttttattcttcagcacgttggcggtgagggcgaccagcggcggtagctcgtcagcggcaaagcgctgtttcagttcccgggaaatatccagtccggtcatgtccggtaactgaatatccaacagcacaaggtcatattcgcctggctcaaacatctccagcgcggctttcccggtcatcgccacatcaacgctgttacccagtttttccagcactgaacgggccacaataacgttgagctcaatgtcctcaaccagcagcacgttgagcgccggtaatggcatgtcgtcttccgccagcgtatcttccacttcttccgcaatggcaggcgcatggacggtaagcgtaaaggtcgcccctttacccggctggctggtaacgctgatatcaccgcccatattacgcgccaggcgacgcgagacggcgagaccaatcccggttccggtggccggtttgccgccgtggctgtctttgacctggtaatacatggcgaaaattttgtcctgttccgcttcaggaataccaattccggagtcttccacttcgaagtgcaggatatcgccttcgtcatagcgcacgcggacgttcacccctccgccctgcggggtaaacttcacggcgttactgataagattccacaggatctgccgcaggcgggtcccatccgtgattaccttatgcggcagcggcaggctcggctccagcacaaagcgcagccccttctgctgtgcctgcaagccggataggttttcaaggtcggcaaggaagctggtgaagtccaccggctggttatcgagctgcaccttgcggcgctccattttgtccatgtcgataatatcattgaagatattccccagcgtcaccgccgagacatggatagttttcaggtatttttcctgctcgctggtcagttcggtatccagcaaaattcggctcagcccgacgatcccgtttagcggggtacgcagctcatgactgatggtggaaataaaggtggttttatcccggctggcgcgctcaagagcgtcctgatagcgtttacgttcggtgatatcgcggccgaagcccatcaggccgcgacgcttaccgacgcgatcgtagtaggggaccttgcggatttcaaagcacgctttgcggccatcgggatagtccagccactgctcataggtcagcgatacattatggcggaacaccttctcgtcggtctccagtaccttttccgccgcctcttcgctatagacgtcctgcggtttgaggtggatcagctgtttctcgcttttgccggtcagcagctccatcgcccggttacagcctgaaaactccttatcctcattgcgatagaagaccaggtccggggaagcatcaaggaaagagcgcagaaaggaggattgctgttcgagctggatctgcgtctcttcacgctctttcatctcaatcttcaactgctcgagggtggtctcgcgctcggcttccgctttttcacgttcgccaatctcctgattcaactgcgcgatgttatctttcagttggacgttcagctttagatcgcgctcacgcatctcctccagcttgtccaccagccgcgaaagacgctgacgggactcttcgagctgctccaccaccaccgagagaaagtagaccgcccaaggcgtgatcagcaggccaaagaagatagagcggataacgtcgatactttcaacctggccatgcagcaccatggtaaccgccatctgtaccacgatggccagcaccaccagcgcaagagccaacagcatcgaaaagcggaccagacccagcttcatcatcaggtcgacataatactgcgccagcatacgaatttgcttcataggggattccttcacgacaactccgcacaataatactcaattctgagcaatgcgctgtaagttgtgcaaaaaatgcgggcaggagtcgatacggcggccggccgctgaggcgaaccagccgcaaaagagggggatcaggagagggattaacgcttgcttaacgcctcccagagtcctttcaggtaggtcacgccaagggcgcggtcgaacaggccatagcccggccgtccggtctctccccagataaagcgaccatgatccgggcgaatatagccgtcgaatccgttgtcatacagcgcttgcatcactttgtacatatccagggagccgtactctgacggatgggcgcactcgtaaaagtctttatcctgcatcagctttatattgcggacgtgggcaaaatgaattcgcttacgccgcgtaaattcggccaggatggcgtacacgtcattatcaggatcttcggcaatcgagccggtgcagagcgtaatgccgttggcgggtgaatcgacggcccggcagatccagtccagatcgtcgcggtttttgaccacccgcggcaggccaaaaatggagtacggcgggtcgtccgggtggatcgccattttcaccccaacctcttcgcaaaccgggatcaccgcctgcagaaaataaaccaggttctcccgcagcttctgatcatccaccgcgctatatttggcaaacagggtctgcacctccgccagccgttccggctcccagcccggcaaggcgaagccgtttgaattctcaagcacctccttcaccacgtcttccagccgcttatcgatatctttcttctcaaacgccatcgtcagcgagccatccggcaggacgtagttcatatccgtcttcatccagtcgaaaaccggcatgaagttatagcagatgactttaacgccaaagcgggcaaggttgcggatggtctgctggtagttggcaatatagcgctcacgggtaggtaggccgattttgatgtcgtcatggatgttgacgctctctatcacctccattttcaggcctgcggcatgggcctgaccgaccagacgctcaattttatccaccggccatacttcgcccaccgcgacgtcgtagagcgcgccgaccaccccctcaacgccaggcacctggcgaatatgttctaatgaaatcttgtcttcctctggtccaaaccagcgcattgtcatctgcattgtcttcacctgctcaacttagtttaatttaccctactaccataccagtaatcatagatgattgagcgttggctgtcgtgatagcgatcacattcctgccgaccggctcgcaagcggcgaatgcgtcggcgcattcataatttttttcaatttatttcaatagattaatcatgccatggctttttctgccgagctttctcaaatgtgatccaggcctgattatgatcttttgcatacttgtatggtaataaaagtagcgtaatttgttcagaaaaaagacaatggaaggaatcaaaatgagaagcgtcgtcgtcaaagagccaggccaactgaacattgaatcacgtccggttccagttccgggcgcccatgaagtacgggtgaaaattgcttttgccgggatctgtggttccgatgtacacatctatcacggccacaaccctttcgcgaaatatccccgcgtcatcggccatgaattctatggcatcatcgacgccgtcggcgagcaggtatctccggcacgcatcggcgagcgtgtcgcggtggaccccgttgtcagctgcggccattgttatccttgctcggtaggaaggccgaatgtctgtacgcagctccaggtcataggagttcaccgcgacgggggatttagcgactatgcctgcgtgccggcgaaaaatgcctggcgcatccccgaggctatcagcgaccgtcaggcaacgatggttgagccttttaccatcgcggcaaatattaccgcccagctgcagcccacggcgcaagatattgccctggtttacggcgctggcccgatggggctgacgatcattcaggcgctaaagggggtatatggcgttaagcaggtgatcgtcgtggatcgcattgccgaacgtctgcagatggcccgggaaaacggcgccgatctgacgctcgataacactgaccagccgctcgcggaacagctggcgcagcggcagcttgcccccacgctggtcattgatgccgcctgccacccggcgatcctgcaggaagccattctcctcgcctcccccgccgcccgcatcggtatactcggtttctccggcgaggcctcgaccctcactcagcaaagcatcaccagtaaagaaatttctattttctcctcccggctgaacagcgggcgttttccgctggtcatcgactggatggagaaaggccttattcgtccggaggcgttaatcacccattgtatgccgctggagcaggtgaaagaggccatggagatttttgctaacgaccgtaagacctgctgcaaagtgctgctgcagctgggttaaaccggcatcgtatagaataacggccgacggatatctgcatatccgccgcgcctgatataaataatataatgagcatggtgttatcatgggaaaaaatatccgctggattatcgtcctgttattatttttagtatatatgataaattatctggaccgggtggcattatccattacggtcccgatgattgaaaaggaccttgcacttaacgctgaacaattcggcattattttcggcagctttttcttcggctacgcggtatttaattttattggcggtttggccgtggataagtttggcgcaacgctggtaatgggcctggcggtcggtctgtggtcgctgttttgcggcttaaccgcggtagccaccggcttttattccatgctggtgctgcgggtgcttttcgggatggcggaaggcccgatctgcgcatcggcgaacaagatgatcaacggctggtttcctaaaaagcaagcggctaccgccgtcggctttctcagcgcaggctctccgctgggcggcgcggtcgccggccccatcgtcggttacctggccctggcattcggctggcgcccggcttttatgattattttcgctatcggtattgtatggatgatagcgtggtttttcattgccgctaattcgcccgaaaagcacaaaaaagtcagccaggaagaacttaagctgattaataaaatgaaagaagaagaagtcgcgctggaaacaatagaaaatcaaacagctcactcgctgggttattatttgaaacagccaattattctggtaacggcctttgccttcttctgctacaactatattctgtttttctttctcagctggttcccgtcctatctggtacaacagcaccatctggatattaaacagatgagccttaccactatgatcccatggatagtcggctttgtcggtctggcgcttgggggctatatttccgataaaatttttaaactcaccgggcgcctgctgctgtcgcgcaaaattgtgctggtggtatgcctgctgatggccgctatctgcgtgggactggcgggtaccgtcagcagcgtcgtgcctgccgttctgctgatgtcggtctccatctttttcctctatgtaaccggggcgatctactgggcgattatccaggacgtggtgcataaatcccgcgtcggcggcgccagcggctttatccatcttatcggcagcgtctccggcatcgtggggccgattgttaccggctatatcgtgcagtctactggtaaatttgacagcgctttcgttctcgccggcactatcgccgcgcttggcgccctgctggtgctgttcgtgatcaaaactccgcgtgtgacgatgaaagccagccaggcataaatggcaggagcgcgatgtccggcattgttcccgacatcgcgctcgtacttctcactcagcctggggagcaacccagctacggcccagcgccgagccctgagcgccctgctgattcagataacgatccagttcaaccatgccggtccagcgattttcacaccacagcggcgccaacagcgtgggccgacgggcgctggcggaaatacggtggtagatcacctccggcggcgtatggcggatcatctctccagcggtgacggtatacgcctccagctcaatgccatcgagacgcccggcctgccacgctttggccataatgctgcctttcacaatatgcagtggatgcaatttgatcccatccacgccggtcgccactacctgctccagcgtctgcagacaatgcccctggctctctccgggcagaccgacgatcagatgcgcacagactttcagcccccgctctcgcgccaggcgcgcggtacgctgataacaggcgaaatcgtgtccacggttaatgcgatgcagggtcttgtcatgagcagtttgcagccccagctccagccatacctcatacccttgctgatggtattcactcagcaggtcaaggaccgcctgcggaacgcagtccgggcgggtgccgacgcacaggccaacgatatttgcggcactgacggcctgacgatacattgaacggagcacctgcacttcagcgaaggtgctggtgtaggcctgaaaataggccagatagcgcttcgcccggttgacgagctgcgcctgatgagcgagctgttcggcgatagagcgatgctgctgcgcctcatcggcaaacgatgccacgttacagaaagtgcaaccgccgcggcccagcgtgccgtcgcggtttgggcagctaaaaccgccgtgcagcgttagcttatggaccttttcgccatagcgacgcataagatccccaccaaacatattgactaatttctgtaactgcataatctgatagaccgccctcaacaaagggggccaagcctgccacttttcgtcaccgacggcgatgacctggatcaatcgtcagcgcggcgaccaaccctattgcataaacaatcaagattactgcaatttcattcaaccaccaggtgatgagttttccttatattttatcttcgcattgccctaatctgctttctggtaaaaaacggtattaatgtccagtagttaaaaatattgcagtcaaatatgctaataatgaaatatatttcagcgcatattggtaatgcaaagccgcgtgcacagtgagacagatcacactagccgcaccaccagcaggcgtattcaaagcataaaaattgccattattttctttaataacaattagttaacttgggtatagcacatttttgtattaataagattgccatttgacgtaagtgtggattcccgataagttgggaatccgctggaagctttctggatgagcactctgctcatcatatttatgcagtaattgagattccctcttaacagcaagtcctcaaacttgtgtaccgatgcgaaaaggatttaaagagggcgaatgcgaggtgtaaaccccgtcgccatgctctttctgtgcctgtgcgcaatcggtatcggagggtgtccgtagagcctggggaggttcactgatatgttgtacgacaaatcccttgagagggataactgtggtttcggcctgatcgcccacatagaaggcgaacctagccacaaggtagtgcgaaccgcaatacacgcactggcccgcatgcagcaccgtggcgcaatccttgccgatggtaaaaccggcgacggttgcggtctgctgctgcaaaaacccgatcgtttcttccgcatcgttgccgaagagcgcggctggcgtttagccaaaaactacgccgttgggatgctgttcctgaataaagatcctgagctggctaaagcggcgcgccgcatcgttgaagaagaacttcagcttgagaccctgtcgattgtcggctggcgcgatgtgccgaccaacgaaggcgtgctcggtgaaatcgccctctcctcgctgccccgtattgagcaaatctttgtcaacgccccggctggctggcgcccgcgcgatatggagcgccgtctgtttattgcgcgtcgtcgcattgaaaaacgtctgcaggaagacaaagatttctacgtttgtagcttgtccaatctggtcaacatctataaaggtctgtgtatgccggcggatttgccgcgcttctacctggacctcgcggacctgcgcctggagtcggctatctgcctgttccaccagcgcttctccaccaacaccgtaccacgctggccgttggcgcagccgttccgctacctggcgcacaacggtgaaattaacaccattaccggcaaccgccagtgggcccgcgcccgtacctataagttccagaccccgctgatcccagacctgcacgacgccgcgccgttcgttaacgaaaccggctccgactccagttctatggacaacatgctggagctgctgctggccggcgggatggacatcgtgcgcgccatgcgtctgctggtgccgccagcctggcagaacaacccggatatggatccggagctgcgttcgttcttcgactttaactccatgcatatggagccgtgggacggcccggcgggcatcgtcatgtccgatggccgctacgcggcctgtaacctcgaccgtaacggtctgcgcccggcgcgctacgtcattaccaaagataagctcatcacctgcgcctccgaagtcggcatctgggattaccagcctgacgaagtggtcgagaaaggccgcgtgggcccgggcgagctgatggttatcgatacccgtgccggacgcattctgcactcagcggaaaccgatgacgatctgaagagccgccatccgtataaagagtggatggagaaaaacgttcgtcgcctggtgccgttcgaagatctgccggacgaagaggttggcagccgccagctggatgacgacacgctcgccagctaccagaaacagtttaactacagcgcggaagagctggactccgtcctgcgcgtgctcggcgaaaatggccaggaagcagtcggttcgatgggcgatgacacgcctttcgccgtgctctccagccagccgcgcattatctacgattacttccgtcagcagttcgcccaggtgactaacccgccgatcgacccgctgcgcgaagcgcacgtcatgtcgctggctaccagcatcggtcgcgaaatgaacgtcttctgcgaagcggaaggccaggcgcatcgtctgagcttcaaatcgccgatcctgctgtactccgattttaaacagctgacgacgatggaagaagagcactatcgcgccgacgtcctcgatatcacgttcaacccggcagaggcctccctcagcgagacggtgaaagcgctgtgcgataaagcggagcaaatggtgcgcgacggcaccgtgctgctggtgctctctgaccgcaacatcgccaaagaccgtctgccggtaccggcgccgatggccgttggcgcgatccagacccgtctggtcgataaaagcctgcgctgcgatgccaacatcatcgttgaaaccgccagcgcccgcgatccgcaccacttcgccgtgctgctcggctttggggcgacggctatctatccatacctcgcctacgaaacgctggcgaagctggtcgacagcaaagccatcgataaaccgtaccgtgcggtgatgctgaactatcgcaacggtatcaataaaggtctgtataagatcatgtccaagatggggatctcgaccatcgcctcctaccgctgctcgaagctgttcgaagcggtcggtctgcatcgcgatgtctccgagctctgcttccagggcgtggtcagccgcatcggcggcgccagcttcgacgacttccagcaggatctgctgaatctgtcgaaacgcgcctggctggcgcgtaagccactggcccagggcggtttgctgaaatatgtgcacggcggcgaatatcatgcctacaacccggacgtggtgcgcaccctgcagcaggccgtgcagagcggcgaatacagcgattatcaacaatacgcgaaattggttaacgaacgtccagcggccacgctgcgcgacctgctggcgctcaacccaggcgaagacgctatcagcatcgacgaagtagagccggcgaaggagctgtttaaacgcttcgataccgcggcgatgtcgatcggcgccctgagcccggaagcgcacgagtcgctggcggaagcgatgaacagcatcggcggcttctccaactccggtgaaggcggtgaagacccggcgcgctacggcactaataaagtgtcgcgcatcaagcaggtcgcttccggccgcttcggcgtcacgccagcctacctggtcaatgccgacgtcatccagatcaaagtcgcccagggggcgaaaccgggtgaaggtggccagctgccgggtgataaagtcaccccgtacatcgccaaactgcgctattcggtaccgggcgtcacgctgatttccccgccgccgcaccacgatatctactctatcgaggatctggcgcagctgattttcgacctcaagcaggtcaatccgaaagcgatgatttcggtcaaactggtttctgagccgggcgttggcaccatcgccaccggcgtggccaaagcctatgccgacctgatcaccatcgccggctacgacggcggcaccggggcgagcccgctctcttcggtgaaatatgccggctgcccgtgggagctcggcctggtggaaacccagcaggcgctggttgccaacggtctgcgtcataagatccgtctgcaggtggatggcggcctgaaaaccggcctcgatatcatcaaagcggcgatcctcggcgcggagagcttcggtttcggtaccggcccgatggtcgcgctgggctgtaaatacctgcgtatttgccacctgaacaactgcgctaccggcgtggcgacccaggatgacaaactgcgtaagaatcactatcacggtctgccgttcaaagtgaccaactactttgaatttatcgcccgtgagacccgcgagctgatggcccagctgggcgtcaagcgtctggtggatctgattggccgcaccgatctgctcaaagagctggatgggttcaccgccaagcagcagaaactagatctgggtaaactgctggagaccgcagagccgcatccgggcaaagcgctgtactgcaccgagaacaacccaccgttcgataacggcgtgctcaacgcccagctgctgcagcaggcgaaaccgtacgtggatgaaaagcagagcaagacgttctggtttgatatccgtaacaccgaccgctccgtgggggcctcgctgtccgggtatatcgcccagacccatggcgaccagggactggcgggcgacccgatcgtcgctcactttagcggcaccgcgggccagagcttcggcgtgtggaacgccggcggcgtggaactgcatctgactggcgacgccaacgactacgtcgggaaaggcatggcgggcggtctgctggccattcgtccgccggtgggctctgcgttccgcagccatgaagccagtattatcggcaacacctgcctgtacggagcgaccggtggtcgtctgtacgccgcaggccgcgcgggcgagcgtttcgccgtgcgtaactccggcgccatcaccgtggtggaaggcatcggcgacaacggctgcgaatatatgaccggcggcatcgtctgcgtgctcggaaaaaccggcgtcaactttggcgcagggatgaccggcggctttgcctatgtcctggatgaagatggcgacttccgcaaacgcgtgaacccggagctggtggaagtgctggacgttgattctctggccatccatgaagagcacctgcgcggtttaatcaccgagcacgtacagcttaccggttcgcaacgcggcgaagagatcctcgccaactggccggccttctccgcgaagtttgcgctggttaaaccaaagtccagcgatgttaaagcactgttgggtcaccgtagtcgttccgcagctgagctgcgggtgcaggcgcagtaaggggttaagatgagtcagaacgtttatcaatttatcgacctgcagcgcgttgatccgccaaagaaaccgctgaagatccgtaaaattgagtttgtggaaatttacgagccgttttcagaaggccaggccaaggcgcaggcggatcgctgcctctcctgtggcaacccgtactgcgaatggaagtgcccggtgcataactacatcccgaactggctgaagctggccaacgaggggcgtatttttgaagcggccgagctgtcgcatcaaaccaacactctgccggaagtctgcgggcgcgtctgcccgcaggaccgcctgtgtgaaggctcctgtacgctgaacgatgagttcggcgcggtgaccatcggcaacatcgaacgctatatcaacgataaggcattcgagatgggctggcgtccggatctctccgacgtgaagccgaccggtaaaaccgtcgcgatcatcggcgctggcccggcgggcctcgcctgcgccgacgtgctgacccgtaacggcgtcaaggcggtggtatttgaccgccatccggaaatcggcggcctgctgaccttcggtatcccggcgttcaagctggaaaaagaggtgatgacccgccgccgggagatcttcaccggcatgggcattgagttcaaactcaataccgaagtgggccgcgacgtgcagctcgatgacctgctgaaggagtacgatgcggtgttcctcggcgtcgggacctatcagtcgatgcgcggtggactggacaacgaagacgccccgggtgtttacgacgcgctgccgttcctgatcgctaacactaagcagatcatgggctttggtgaaaccgccgatgagccctatgtcagcatggaaggcaaacgcgtggtggtgctcggcggtggcgacaccgcgatggactgcgtacgcacctccgtccgtcagaatgcggcgcacgtgatctgcgcctatcgccgtgacgaagagaacatgcccggctcaaaacgcgaagtgaaaaacgcgcgcgaagaaggcgttgagttccagtttaacgtccagccgctgggcgtggaagtgaatgccaacggtaaggtttgcggcgtgaagatggcgcgcaccgaaatgggccagccggatgcgaagggccgccgccgcgcggagatcgtccccggctctgagcacgtggtgccggctgacgccgtagtcatggcgtttggcttccgtccgcacagcatggagtggctggcgaagcacagcgtcgagctggactcccagggccgtattatcgccccggaaggcagcgaaaacgccttccagaccagcaacccgaaaatcttcgccggtggcgatatcgttcgcggttccgatctggtggtcaccgcgattgccgaaggccgtaaagcggcggacgggatcctcaactaccttgaagtctgattaggtccggagcctcacgcataaaagcccgatggttaacgtcatcgggcttttttattgctcattcgccgggcaaaccgccgctttcagcgccgtattataccagccgcagatatgctccaggcgggtaatcgccgagccgacggtcaccgcccacgcgccgcagcgcatcgcctccgccgcctgggcaggcgtgttatagcgcccttcggcaatcactctgcagcccgccgcgctcaggcattgcaccagcgccagatccggctcatccggcgtctcctctgcggtatagccggagagagtcgtcccgacaatctcagcccccaactgccagcactcgagagcatcgtcgagagatgagcaatcggccatcgccacttttcccagctgatgaatttctgctaatagcgccgacactgacgccggacgctgacgctgggtgccgtcaatagcaataatatccgctccgccctgcgccagcgcgtcgatatcttccagccatggcgtaatacgcaccgggctatcgggcaaatcgcgttttatcaacccaataacgggcaccgtcactaacggacgaacggcctgcaggttggccaggccttcgatgcgcagcgctaccgctcccgcctgctcagccgccagcgccattgccgcgacgatagcgggattatccagcggactgcccggcaccggctggcaggagacaattaatccgccatgatgacggatacgctggtccagttgtgcgagtaaagacatgtctgctccctaaaaactacctgtggcgatgacgataccagccatgggacgcctcgtttgtggcagagttaacaaagcggacagacaaaaaaacaggccccgcagggcctgtcagagaagggattcacttcaccacgcgcagcgccgggcgaccaccgcgcggcggcggcgtgtcgtcaggatcgtcgtcgtgattatccggcttatcgccatcgatcaccgacatcaccgtttcgctttcactctccggcgcgacgtcatcatcgttgaggctgctgacgtcttcgtcataggccgcttccggttcgaacatcgtaccagcgccgttctcacgggcgtagatggcgagtaccgcagccagcgggacagacacgttgcgtggtaccccgccaaagcgcgcgttgaagcgcacttcgtcgttcgccagctcgagattgcctaccgcacgcggggcaatattgagaacgatttgcccatcgcgcgcgtactccatcggcacgagcacgcccggcagcgtcacatccaccaccaggtgcggcgtcagctggttatccagcagccagtcataaaacgcccgtaacagatacgggcgacgcggcgtcagctgtgatacatccattatttagccccgaccgaggcgcatttcacgctcggcttcagttaaagaagcgaggaaggaatcacgctcaaatacgcgagtcatatagcctttgagctctttcgcaccagcgccaaccagctccacaccaagaaccggcagacgccacagcagcggcgccaggtagcagtccaccaggctgaactcatcgctcaggaagtaaggtttctgggtgaagaccggcgcgatggccagcaattcttcacgcagctgcttacgcgcagcatcagcttgcgctgcggtaccgctctggatggtgttcatcagcgaataccagtccttctcgatacgttgcatatacaggcggctttcaccacgcgccaccggataaaccggcattaacggcgggtgcgggaaacgctcatccagatactccataatgatgcgggattcccacagagtgagctcacgatccaccagcgtcggtacgctttgattcgggttgaggtcaatcagatcctgaggcgggttatccttctccacgtgctctatctcaaaactgacacccttctcggccagcacaatgcggacctgatggctatagatgtcagtaggaccagaaaacagcgtcattaccgaacgtttgttggcagcgacagccatgaaaacctccaggtatattcagaattttgtactgctgccggccactcatgaccagccagatgtaaaaaccccattagcgcgatgtcaccttcgttcacgaataaaacaaaaaatgaacaatcaccagcatttgggcagaaaattggatgatagtttaccagattttgaagacgttgtggtgaggggattctggaaatgctgaaaaagtggcgagaaccggcgctatgcttgtggataacagccgttttatccataaaaaaacccgccgaagcgggttttttcgcaaattgttctgcgtgagcagaaaacaattaacgtttggagaactgcggacgacgacgtgctttacgcagaccgactttcttacgttcaacctgacgagcgtcacgagtaacgaagccagctttacgcagttcggaacgcagggactcgtcgtactccatcagagcgcgggtgataccgtgacggatcgcaccagcctgaccagagataccaccacctttaacagtgatgtacagatccagtttctcaaccatgtcgaccagttccagcggctgacgaactaccatgcgggcagtttcacgaccgaagtactgttccagagaacgctggttgataacgattttaccgttgcccggtttgatgaaaacgcgagctgcggaacttttgcggcgaccagtgccgtagtattgattttcagccattgcctataatcccgattagatgtcaagaacttgcggttgctgtgccgcgtggttgtgctcgttacccgcgtaaactttcagtttacggtacatagcacgacccagcgggccttttggcagcatgcctttaaccgcgatttcaatcacacgctcaggacggcgggcaatcatctcttcaaaggtcgcttctttgataccaccgatgtggccggtgtggtggtagtacattttgtcttcgcgcttgttgccggtaacagcaactttttctgcgttcagaacgatgatgtaatcaccggtatcaacgtgcggagtgtattccgctttgtgcttaccgcgcaggcgacgagccagttcagtagccagacggcccagagttttaccggtcgcgtcaacaacataccagtcgcgttttacggtttctggtttagctgtaaaagttttcattaaaagcttacccaaataataagttacacgttggtgaacacccaaacgtttagtcagttgaggttcacacgacattgtccagcaaacctaccccttcgaatagcctatgccggcgcatagaaagtttcgggaaaaaaaccttctcgtaacgtggggtcgcaagattatagagaagtcggggtcaaagatcgacccctttatgagatttttcaggccgcgcccggggcggccttgcggccctgaatccgcctgaaaaagtcccctgtcagggcatatgcggacgtttgaggtactcttcgctctgcatctcctgcagacgagagagacagcgctggaactcaaacttcagccgctcgccctggtaaatgtcgtacagcggtactgccgcgctgaccaccagctttacatggcgctcgtaaaactcatccaccagagcgataaagcggcgggcctcgctctccagctgcgcggtcatcaccggcacgtcgaacagcatcaccgtatggaacagtcgggagagcgcgatatagtcatgctggctgcgcgcatccacgcatagcgtggcgaatgacgccgccagcgtctggttttctacgccgagggtaggcagctcgcgatggttaatctccagcgtcggcccggcagcgcgcggcgcacccgccagcgcgagccacaatttatccatctgttcgcgggtgtcgttattcagcggcgacagccacaggtgcgcctgcgtcagggtacgcagtcgataatcgatgccggcatcgacgttcataatatcgcaatgctgcttgatggcatcgatcgccggcagaaaacgggcccgctgcaggccattacgatagagttcatccggcggaatattggaggtcgccaccagggtgatgccgcgggcgaacagggctttcatcagcccgcccaacagcatggcgtcggtaatatcggagacaaaaaactcgtcgaaacagagcacgtcggtttccgctttaaagcggtcggcgacgatctccagcgggtcgctatgtccctgcagggtggtcagctcttcgtgtacgcgcagcatgaaacgatggaaatgcaggcgctgtttacgctcgcccggcaggctctggtaaaacaggtccatcagccaggttttgcctcgccccacgccgccccacatatacaggccgcggacaggtgccgtcccggcagccggctcgcgcttacccagcagtttgccgaatttcgcgcgcaaaccgccgcctgacgcgaccggcgcgggctgcgtctgcagttcctggtaaatggtatcaaggcggctcaccgcttcttgctggacgtcgtcgggttgatggctgccctctttcagggctaaaaggtaacgcgatgttggagacaggctttgcatgatctaattgttattccttgaaaaccgtaatgccgaagctcacgattgacgaaaaaaaggccgttctacactacgcgatgatacgccaggattccacttctgtggaattagcggttatagtggcactatcgggcgcaggcggagagcctaagagccaccctacggaaccacaatacaacgggagatgttcatgacctgggaatacgcgctaattgggttagtcgtcggtatcatcattggtgccgtcgccatgcgtttcggcaaccgcaaactgcgccaacagcaggcgctgcagtacgaactggaaaagaataaagccgagcttgaagagtaccgtgaagagctggtgagccactttgcgcgtagcgccgaactgctggataacatggcgcacgactatcgtcagctatatcagcatatggcgaaaagctctaacaacctgctgccggactcgatggcagacgccaacccgttccgcaaccgtctggaagagtctgaagccagtaacgatcaggcgccggtccagatgccgcgcgactactccgagggcgcatccggtttactgcgcggaggcgcaaaacgcgattaagcctcgctgcgattaaaatattctccgggcgcgcccgtcgcgcccgctccttcccccacttcccggctacaatttaaaccagtccccacgttgttacctgtgcaaaaattcaataacatcaggttattcaggacatttttccatacacctcaggttacgagagccagcatctaatgaagaaacagactttgctgttgagtgcgttagcgttaagcattgggttatcgttgtcggtcctgcctccggcagcggcatccttaccgactcaggtgcccggccagggcgcgttaccaagcctggcgccgatgctggaaaaggttctgccggcggtggttagcgtacaggtggaaggcactgcctcgccgacgctcaatatgccggaagagctgaaaaaatattttggcgataacgccccgcaggagcaggcgcagccgtttgaagggctcggctccggcgttatcatcgacgcggcgaaaggctatgtgctgaccaataaccacgtcatcaatcaggcgcagaagatcagcgtccagctgaacgatggccgtgagttcgatgccaaactggtcgggagcgatgaacagagcgatatcgctctgctgcagctgattaagccagaccacctgacgcaaatcgccattgctgactctgataaacttcgcgtcggcgacttcgccgtcgccgtcggcaacccgttcggccttggccagaccgccacatccggcattatctctgcccttggccgcagcggcttgaaccttgaagggctggagaatttcattcagaccgacgcctcgattaaccgcggcaattccggcggcgcgctgctgaacctcaacggcgagcttatcgggatcaacaccgcgatcctcgcgccgggcggcggcagcatcggcatcggctttgccattccaagcaatatggcgaaaaccctcgccgaccagcttattcagtttggcgaaatcaagcgcggcctgttgggcattaaaggcatggaaatgagcgccgacatcgccaaagcgatgaatctcaacgttcagcgcggcgccttcgtcagtgaagtcctgccaaactccggctccgccaaagcggggattaaatccggggacgtcatcgtgagtctgaacggcaaaccgctgaacagtttcgccgaactgcgttcgcggatcgccaccaccgagccgggtaccaaggtcaaactgggcctgctgcgcgatggaaagccggtcgatgtcgaagtgaccctggataagagcacctcctcaaccgccagcgcggaactgattatcccggcgctgcagggggcctcgttcagcgacggccagatgaaagatggcaccaaaggagtggtgatcggtaatgtggataaaggcagcgccgccgcccaggtcggtctgcataaggatgacattatcattggccttaaccggcagcatattcactcaattgccgaactgcgcaaagtgctcgaaggcaaaccgccggtcatcgccctgaacgtgatccgcggcaacgaaagcatctatctgctgctgcgctgattgtctctccgggcatcgccgccatgtgcgatgtccggacaactcgtgctatgctgcgcctgaccattcattaacgatatctgcatcatgcctggaaagttattacgttcagtactcatcggtttgcttgtcgggggtctgctgctggccctgatgccctcgctgcgccagtggcagttggcgccgactacccagaacgatacggcagacgactccccggcgagctataacgccgcggtgcgccgcgcggcgcccgccgtggtgaacgtctataaccgcgcccttaacagcaccagccataatcagctgacgcttggctcaggggtgattatggatcagcgcggctatatcctgaccaacaagcatgttatcaacgatgccgatcagattatcgtcgccctgcaggacggccgcgtcttcgaagcgctgctggtaggatccgattccctcaccgatctcgccgtgctcaaaatcaatgctaccggcgggctgccggtgatcccgatcaatccgaaacgcacgccgcacatcggcgacgtggtgctggcgattggcaacccttataacctggggcagaccatcacccaggggattatcagcgccacagggcgcattggcctcaatccgaccggccgccagaacttcctgcagactgacgcctcgatcaaccacggtaactccggcggggcgctggtgaactccctcggcgagctgatggggattaacaccctctcctttgacaagagcaatgacggcgaaacgccggaaggcattggctttgcgatcccgttccagttagcgaccaaaattatggataaactgatccgcgatggccgggtgatccgcggctatatcggcattagcggccgggagatcgccccgctgcacgcgcagggcggagggatcgatcagattcaggggatcgtcgttaacgatgtcgccccggacggtccagcggcgcaagccgggatccgcgccaacgacgtaatcatctccgtgaatgacaaacccgccgtctcggcactggagacgatggatcaggtggccgagatccgcccgggatcggaaattccggtggtcatcatgcgtgatgataagaaaatcacgctccatatcgccgtccaggaatacccggccaccaactaaacggctccccgtttggggagccacgttaatcgctaaataccggaccggccgggaatctgaccagaaacccggtttccatgaatgctggacaataaaaagccggaacagcggttccggctcttctgttagggcgagattacttgttgacgaagtcttcgccgagcgcgatatctttcttcagggtgtccagcatgccctccagcgcctgctgttcaaaggcgctgagtttgccgatagactgtcgctcttccacgccgtttttccccagcagcagcggctgggagaagaaacgcgcatagtggccgtcgccttccacgtaggcgcactccaccacgcctttttccccctgcatggcgcgaaccagagagagaccaaaacgggcagccgcctggcccatcgacaaggtcgccgacccgccgcccgctttcgcttccacgacttcggtaccggcgttctgaatacgtttagtcaggtcggcaatttcctgatcgctaaagctgacgccggggatctgcgacagtaaaggcagaatggtgaccccggagtgaccaccaatgaccgggacttccacctcggttgccgatttacctttcagctccgccacaaaggtattggaacggatgatgtccagcgtggtaacgccgaacagtttgtttttatcgtacacgccggcttttttcagtacttcggcggcgatagccacggtggtattcaccgggttggtgataatgccgatgcaggcctgcgggcaggttttggcaatctgctgcacgaggttcttcacgatacccgcattcacattaaacaggtcggaacgatccatgccgggcttacgcgccacgcccgcggagatcagcactacatccgcgccttccagcgccggagtagcgtcttcaccggaaaatcctttaatttttacatctgtggggatatgacttagatctaccgccacgcccggcgtaaccggagcgatgtcgtacaacgagagctctgaacctgaaggcagttgggtcttaagtagtagggcaagcgcctggccgataccaccggcagcgccaaggactgcaactttcatcctaaactccttattatggttaatttagtctttcgttattccgtcgcctggaccttaattcacaagatgaacaattacaatgattatggctgaagaatgcattattgtgcgtagcaatagaacagcggcgcactttatgcttcctgactgaccatccagcaaagcgaagtaccggatcgactattggttacaatacacccagccagttgcgcaaaacaacaccaactcaataacatttcatttacttttacatggctttaagcgttgtgatgagaacatgttccttatacggtttttttgctaaaatatgcccccttcataacattattgacctatcctttcgcggattatttgcataaaaattcatggttatgcataatgatgttgattttaccaccataatctgggtgacttatgcgaagttcggcaaaacaagaagaactggttaaagcgtttaaagcgctgcttaaagaagagaaattcagctcgcagggagagatcgtccaggcgctgcaggaagagggcttcgagaatatcaaccaatcgaaggtttcccgcatgctcaccaaatttggcgcggtgcgtacccgtaacgccaaaatggaaatggtctattgcttgcctgccgagcttggggtaccgaccacctccagcccgctgaagaatttggtgctggatatcgactataacgatgccgtagtggtgattcataccagccccggcgccgcgcagctgatcgcccgtcttctcgactcgctgggcaaagcggaaggcattcttggcagtatcgccggggatgacaccatctttaccacgcctgcgcgcggttttacggtgaaagatctgcacgacgccattctggttctgtttgagcaggaactctgagtaattcccctctggctaccgtcagagggcgactcccttttcttttgcctctccccccttccggcacaacaactatttaacacttagtgtcatttacgccgtctatacgttcttttactaacgcgaaaatcgtaaaacgcacaaaagatcaaattcgtatacctttatgaatttattagaaataaatcttatcgctgtcgctaacgtgtcatttttaattcttatccgttataaaaagcgcaatccattgtaactattaacgcacaaaacaattagcatggtattaatatttttggtgattagtgtatacttggttttgtgatgagggtcacgaaacaaagccccccaacaaaaagattcgacgaggtgaacatcatgaaaatcaaaaccactgtagctgctatcagcatcctgtccgtcgtgtcgtttggcgctttcgccgctgatattatcaacagcgagcaggcccagggccgcgaggccatcggcacggtttccgtcggcgcggtagcatcttccccgatggatatgcatgaaatgctgaacaaaaaagcgcaggaagaaggggcttcttcttaccgcattattgaagcccgcactggcgaccactggcatgccactgctgagctgtataaataagttttagacgtcaacgattaacctgacaaaaattctctaccgcggcccggcgacatacatcgccccgccgcggcaaaacaaagactggagtaaagattatgaaacgcgcaatgatcatcgcatcccttggcctggcttcccttctctctttcggtgccagcgcggctgtccagcaagtgaacgcagaacaagcccaaaatctgcaatccatgggcaccatctccgtatcccaggtaggtagtgcgccaatggacatgcgtcaggaactggcggctaaagccgagaaagaaggcgccagcagctaccgtattattgaagcacgtaccggcgatagctggcacgccaccgctgagctgtacaaataaaccctcgtcgtcttatttcgacgacttgcccccgcctgccgggggcttttttatgcttgtcgggcattaaaacgcaactccccctccagctcttcctctgcttcatcaaacaataaaatcaatgcgccaaagcgccggcgctgcttgtcatttaaatggatgaactcaatatccagcggcagcggtagcaggccaccggtcactgcgtcccatagcgaatccaggttgttgaccttatcctgagccagctcgaaggttcgggaaaactcccggtagaaatcctgttgttcggcgatttcgtcaaaatcaaacgtataggtggtcatgacagcccctcccgcttctctttctgtcgccgttaagtatagcgataaaaaaaccgacgcctgggcgtcggtttatgggttagctgctggtcagcacatgctggtacttatgcaacatctcaaccagtcgccgtaccggctcggtgacctgcggcgaggcctcccagacccgcagcttctcctgatagacatcaagctccgccagcagctgggtaaaatagcgccgacgcttatcatcgctgccggcggagatcacatggtccgcggtacgtcgcagctgacgatggaaggcggagagatcgtcgttcaccggcacgggcgcatcgcgcaagcgctgatgggcgatgattaacgtcaaggccagacggaaacgggcgacgtcacctgggaatttattgagtaataaaaacagctgctgatagagcgcgggcagatgattctctttgcgacgcgccgagttggtggtcagcgaagagaccgccgcggagacaaactggttcagcagcacccgaccggttctggcccgggagttatccctgacaataagaataaccatcagagcgaggaaacagccgacgatctgccccagcgcgctatcgaggaactggctgaactggaactgcatcgggttatccagcacaagaatgttgatggtgctcgccagcgcccccagcgatccgagacgccttttctgcacttcgatcccgataaagaacgccatcgccgccaggctgatgcagagcaacagcatgctctgctgcgtcgccggcatgatcaccaggaagtacaaggtgcccaacggtaacgccgccagggtgccatagaggaagtctatcgccaccatacgcgggtttggcaggcgcatcgccagcgcggtaaccacggcgatcattaccatcgcgccgctgcctgaggtccagcccgtccacagccagaatagcgttccgagaatacaggagacagaggtgcgccagaagttcaccatcgcgtgatgacgttcggcggattccactttaaccaccgtttcgccgcgcaacacgccatcctcgatacggctgattttagtattccccaccacgccgcgcttaagcagcaggtaacgcgtggcggcgcccacccagctataaatcgtgaccggggtattatgctcgcctttccaggtcaggaagcggcgcatgcgcttcagctgctggtgaacatcctgcaccgtctcaaccggctcggcgaacagctcgcgatagtcgtccgtgaccatttccgggcgtgagttctgaatcagataggtttcgcaagcctgggtgataagggttagcgaaagggtgttgatcgccttcaggcgctgattggcctttgcccagcgtgaggattccataatcaggttactacgcataccttccagcgccgtagtgcggcgtaccagcgctccccaggcttgatccacttcctctttttcaccgtgcgcgacgcataactgcatcagcttatactgtgcaattagcagattatcgagctcgaggtcgatctcttttttaatcgaacgcggcgaaaacaggagatcggcgacgatggcgctgacaataccgatgacaatttcgctgcagcgttcgacagcaaactgcggcgccagcatcggattggtatggatggtaataatgataatcagcgcggtgtacccggccagcccccaggcataggagttttcgaccttgaccagcgacgaaacccaggtacaaaacccggcccacagacagcagaccagcatcatcaacagaggcgcgcggatcatcaggatgatgataaccagcgccgcaatacagccaataaaggtcccggcaatacgcaacataccgcgatagcggatcgcgccggagtacggttcgccgccagcagcaaaggccggcccggcggcgacgatcgctgccgtcagtaccgcccagcgcggcgtttcgagctgaaaatggaaaccgacaaacagcgccagcaccaccgcgcatgcaagcttaatggcaaagcggagatgccggggagcaatggtatatgtccccatagcgattaaccaaattcgcgcaggcgcatagccagtttctggaagaagttggcctggctggtatcacgatcttcttgaccggtgatcactaccgtcgccgtggtgcccgatggccacagattcccctgctggtgatcgaggcgaatacgcaccggcacacgctgcgccagacgcacccactcaaggttggagtcgaccgaggccatccctttcgagtcgctgctgctgctggcgttggtcacccccgcagcgatactgtccaccgtccctttaatggttttgctgctgcccagcggggtaatctccgcacgatagcctggacggacgccctccagtttggtctcttccagataggccatgacgtaaaacgtattctctttcaccagcgccaccgccgtggagccacgggtgataaattccccagtgtagacgttaaggttagtcacccagccatccgcaggggcgcgaatgaccgtccgctccagatctagcctggccaggtcgcgactagccaccgctttcgccagctgatgttcaacggtttgcagtacgttgttcgcctgatcaatctcttcccgcgacatcgcctgtacgccaagcttattacgccgaccggcttcgacgcgtttttcctgagctaacgtctgataataggcgacatcagcttccgcctgcgccagcgctttttggtaacgaggttggtcaataacgaacaatacctggtctttcttaaccagttggttatccttgacgtttacctgagaaatcagcccggagacgtcgggggcaatcgccacaatgtcggcgctaaagcgcgcatcacgcgtccacggcgaggcggtgtaataaacccaggcgcggaaaatcgccacgaaggccagaatgaccagtatcacggtaatggcagtacggaggatatttcttgttagtgttttcacatcaacctcaaacgaacaagcgcgatatcaaataaaaaaggcagcaatagagcgccgtattaaacagtgctgggtgccagacaaaatcgtaaatgccggtcggaaccagcagtcggtgcaccagccaaaagatagccagcgacaaaagcaactcgaagaagatcggcggaaacgataagccgaaaatcacgatgacaggaaacagactcatgatgaccttgaataagaagcgtacaggtagtgagcagatgcgtttattatgtagctaacaatatattaacgtaacgattgccgcattatctacaatgtgtgatctaaatcacttttaagccagagtgaataatggaacgattaaaacgcatgtccgttttcgccaaagtggtcgaattaggttcattcaccgcagcggcccgccagcttcagatgagcgtttcctcgatcagtcagaccgtcgccaaactggaagatgaactgcaggtaaagctactcaaccgcagcacccgcagccttggcttaactgaagcaggtaaaatctattaccagggctgccgtaggatgctgtttgaagcgcaggatgtccatgagcaattatacgcatttaacaatacccccatcgggacgctgcgcatcggctgctcttcaactatggcacagaatgttctggcgcgcataacggcgaaaatgctcaaagaataccccgggctctctgttaatctggtcacaggcatacctgcgccagacctgatcgccgacggccttgacgtggtgatccgcgtgggcgccctgcaggattccagccttttttcccgccgcctgggctcaatgccgatggtattatgcgccgctaaaagctatctggcgcaggctggcaatccagagaaaccggccgaccttgccggacatgcctggctggaatatagcgtgcggccggacaatgagtttgtcattatcgcgccggaagggatctcgacccgcctgaccccgcaggggcgcttcgtgaccaacgaccctatgacgctggtgcgctggctgaccgccggggtgggtatcgcctatgtacccttaatgtgggcgatcgaagagatcaaccgcggtgagcttgagatcctgctgcccagctatcagtccgatccgcgaccggtctacgccctgtatacggaaaaggataaactgccgctgaaagtgcaggtctgtatcaactatctgacggagtattttgtcgacgtggcgaagatctatcagggcatgcacgggcgcgggatcgcccggtgaagcggttcccggcagcgccgggaaccaggtcaggatcaggcggtgccgccgacggtaaggttatcgaccttcagggtcggctggccgacgcccaccggcacgctctggccctctttgccacagacgccgacgccgttatccaggcgcaggtcgttgcccaccatcgaaatctgctgcatggtctcaatgccggagccaatcagcgtggcccctttcaccgccttcgtgaccttccctttttcgatcagataggcctcggaagtggaaaagacgaatttaccggaggtgatatccacctgcccgccgccgaagttaggcgcaaagataccgtagtcgaccgattcgataatctcctgtggcgtcgactggcccgccagcatataggtgttggtcatacgcggcatcggcagatgggcatacgactcacgtcggccattgccggtcggtgcgacgcccatcaggcgcgcgttgagtttatcctgcatatagcctttcagaatgccgttttcgattagcacgttgtattgccccggcgtcccttcgtcatcaatggccaccgagccacggcgatcggcgatggtgccgtcatccactacggtgcacagttcagaggcgactaattcccccatatggccgctaaagaccgaggtgccacgccggttgaaatcgccttccagcccatggccgaccgcttcatgcagcaggacgccaggccagccggcgccgagcaccaccggcagcatccccgcaggggcggcgaccgccgagaggttgaccagcgccatgcgcaccgcttctttcgcccaggcatcggcccgcacgtcgccctcctgggaggcgaggaaatagtcataaccaaaacgcccgccaccgccgctgctgccgcgctcacgcttgccatcctcttccaccagcacgctgacggaaagacgaaccagcggacgaacgtcggcggccagagtgccatcggtggcggcgatcaggatcagctcatacaccccgctcaggctggctgaaacctcctgcacccgctggtccgccgcccgggcgactttgtctacccggcgcagaatatccagcttctcttcccgggtcatactctgcagcgggtcgatgctggtgtacagggcacgatgctctacggcgccgagggtctgcactttgccattgccggtgtcgcgcacaatggtccgcgccgcctgggcgctctgctccagcgccagtttgctgatctgatcggcgtaggcaaagcccgttttttcgccgctgacggcgcgcacgcctacgccctgatcgatattgtacgacccatctttaatgatgctgtcttccagaacccaggattcgtgatagctcgactgaaaatagagatcgccgtaatcgaggcggcgctcggtcagttgaccaagaatggcaaacaggtcctgatgattcaggccatttgccgacagtaattgttcacttaccaggttcagactcatcgttatgctactcgtttgttgccgcctgacaggcggaaatacagaaggctatctattgagattgcggcaattcccggcaatcgtcaaatcattgctttttattgctgcgcgcctggcgcagcacttcattgatctgcggctggtcaatcgggccggtgatgcggtagcgcagaatcgaaactttattccacagcggacccagcactttgctggcggcaaataccgccgcgccgacgatggggttgacggcaaaggccgccgccacgccgacggtcgcggagatctccggcgccaccaccgcctgcagatccagctggcgacgcaccagatcgaccgaccctttcatagcaatatccgcttcaaggccatctaccagcgtatcatcggtatgcagtacgccatccttaatccatgccgtactgttaatcgaatcgaagtaaaagccttcgctgaaggtatcgctgaaatcgaaacgcagtttacgcagcagggcatccacactcagcagacgcagcagctggccagcgtgcccggtactcaggtcggtaaactgccccttgcccaggtggcttttaatgatgccattgagcgacgcgacatcgggtgaccagggcggcgcgcgccagtgcagatcgtagtcgatatcaaacggcgaatccttcaccggcgtggagacgccaaagaaatccgcaaatgcatccgtcttattgccgtgcagtctgcctttcagcgaggttcgaacccctgaaggggcgttcacccacacgccgttggtcgtcagccggccaaacccggtatccaccaggccgttggagagcgttaaggtatcccctttgatcgccacatccccatcgatgcggccatatttttgtccccacagccagcattccgcgcagcgtagctgcagatcgggccagccatggaaatccagccgcgtcgccgtctggggggccacattctctgttgcgttctggccgctggcgctggccggattgaaatagagataacgcacatttgccagccacggagcattgtcgcgcatcgtcaatgtggcattgatctcacgcccctgcgcctcaacctgcgagccgccggcgaccggctgggacatcagactgacgttgttccactgttgccccgcaagggccagcgacggcgtacgcagcacaatgcgcggtggaaagagcacgctgctgctcacttcatttgccgcgccgttctcgaagagcgccagccactgcgcgccatccatcggcggcagattaagctcgataccgggctgatcgggcagcggagagtgccctttgctgtcagtggtaaggatcgctctatccagcgtcagcttatgattgagcaaccagcggctgttaatatgattcttcgccccgacggagccggtcaggtcgaagctgctcaggccgccggcgacgttaattttgaccggaaggggttcgccggcgggcttactgactggcgaaggtaagcgactgctcacattcttcagatcgccgttgatatcgaccttatagctggcattgccatggtacggcagttcgatggcgaccttgccatcccacgggacgctaccgctcaacgcctcactcacggctttcggcagcagcccggtgcgcgacggctgccagttggcattcatcccgacatccaccagaaacgctttttcaccttcgcgggtggaaaaattgaggttcagcggctgattaaaccaggtcgcgctcaacgtttgactattgagatcgccattcacaaagctgaaattaccgctcaggttctgcagcgtagtatctaacggtttgataaacaggctattattctgcaggcgcacatcgcctttcgcggtggtcatctcgccgtcgagggggatattcagatgtaagcgagcgctcacatccccatccagctgcagggaatccagcgccgccccgagcgactctttcagcggcgtagtattaaagtaaggtccaacctctttgcccgggcctttgatatcggcatcaatcagcagtttttcctgcgcatagtccgggattgcggcatcgagattgctggcggtcacgttgccaagcatcgctttatccgcccgcatccacaggccgttgttgataaaattgaggtcgatgttcagcccggttagcgccggccagtccggttggaaggcaaaagtggcgttcttcagcggaacataaacctggaactggccttcattatgcggataaggaaatagatgcggattgccgccatacaccagcgtcgcatcgctggcttgccccgctttaatcgcgccgctgagatagtccaccagcgctttgcccatcagattttccgggaaataacgccatgcctggccaccgtcattggtgctgatgcccgccagaatgcccagccagggatcgtccccctgcggttgcagatagcggaagccgccgcgggcgcgtacgcctgtcgcctgcacgtctatatcgcggccatcaagcataaaccctttgtcgtttttcacccaactgagcgtggcttcgccagcggctatctccagcggcgcgcggaagacgccggcatacggcatcagcgccttcgccatatgggcgcgtaattccccgtgctcaacgctgccattcagactgccggagaagtgctctgcccccggcaggagtttccactgcttccacgccagatcgctccactgcgcctgaaaacgcgttttctccgtcgcctgcagggggatatcgagagccagcaaattgattttgccgccaggctgcgtggtacgccagagttcgcccagagaaggcgccagcttatcagcaaacggctgtaacccgctcaggccgctgagggccaaattgctggcgcgaatacgtaactcatcgctacgctgacgatcgtcgccaccaacgtcctgcgccgggatccatgccatcgccagggctccgcttggccagggtttatcatcgatagcgatccgcgtatcgggaatataaaaggcccagctttgcttatcatgggagagatgcgccgtcaggttatccaccgacaaatgatggacttcgttatcgccctgccagctggcgcccccttttttcagccatacgtcgccgctggccacatcgcctttttcaatggtcatccagccttcgaggctgaagcgggcgcttttcagggcgatattgtcctgcatccagcgtcccagccacggtttgacgtcgatatcatccgcctgcagccagacccggcctttattcagcaggccatcctcatcgcgaagatccatccgcacctgcatgacgccatgctggccggtgaggctggagaggctgagctgcccctcggcgcgatgacggttcctgccgttaagccatgtcagctgcggaaccgccagctccgcccgctgaccggaaagggtcaggaagctcaaatggctgtcgcgcagagtaaagtgatcgaactgacgtaaaaagagatcgctgatgcggtcggttttcaggctttcgccaccgtcattggtctgaataggggtattggtatgggcctgcagctgccagaaggtgaggtcgcggaactgccagcgcatatgcagcaggctctgccagacatccagcgccagggttacgcgcttgaccgccattgtgccgccatctttcagcccgacatggatatcgcgggcgtctaacgtcggaccaaaagtctgccagctggcggtgatctgcgaggcgtccaccggcgtaccggtgagggtggagatcttctccagcagctgcggacgccaggcgtcgagctgtggcaacacgagacgcaagccactcaccagcagcgcgacgataacaatcaatgttgccacggtgagcaataaaatcccgggcagtcgcctcacgcctctctccttgtcagccgcacaatgacgcggtgtcttacatcataaccacatcgaactgctcttgattatagagcggctcaatttgtaccttcacctgcttgccgacaaagatttccacttccgccagcgcatgcgactcttcccctttcagggtttccgccaccgcaggggaagcatagaccaggaagcgatcggaatcataagcatgatgtacgcggacgatctcacgcataatctcatagcacaccgtttccaccgactttaccgttccacgtccgtggcaggttgggcactcgttgcacagcacatgctccacgctttcacgggtgcgtttacgggtcatctccaccaggcccagctgggagaagccgttaatgctggtcttcacccgatctttactcagcgcctgctctaaagagtgcaacacccgtcgacggtgatcttcattgttcatgtctatgaaatcaatgatgataatgccgccgagattacgcaaacgtagctggcgggctatcgcctgggtggcttcgatgttggtattgaagatcgtatcgtcaagattgcggtgcccgacaaaggccccggtgttgatatcgatggtggtcatcgcctcggtctggtcgatgatcagatagcccccggatttgagctcgactttacgctccagcgcgcgctgaatttcgttctcaacgtcaaagagatcgaatatcggctgacggccgctgtagtgttccagcttgctggtcatttccgggatatattcggcggtgaattcgagcaacgcctcataggtcaggcgcgagtcgacgcgaatgcgatccagttgcgcatcggcaaaatcacgcagcacgcgctgggccagagccagctcgccatacagctgatagcgggtctggttgcgctttttgcgctccatcaccttggtccatacgcgcttaagataagcggcatcggcggccatctcctgctcgtgaacgccttccgcagcggtgcgaatgataaacccgccctgctcatcgcaatattctgcgacgaccttttttaggcgctcgcgctcggcttcgctttcaatccgctgagagacccccacgtgggaggcgcctggcataaagaccagatagcgggaaggcagggtaatatcggtggtcagacgcgcgcctttggtacccagcggatctttaaccacctggaccatcaggtcctggccctggcgcaccagctccgaaatatcgcgcacggtaaactgcttttgctcctcaccggcgacgcactcggtatgcggcatgatatcggaggcgtgaaggaacgccgccttatccagaccaatatctacaaaagccgcctgcattcccggcagcactcggctaacacgacctttgtagatattgcctactattccgcgtcgcgcttcacgctcaatatggatttcctgcagaataccgccatcaatatacgcaacgcgcgtttcggatggcgttacgttaactaataattcagccgtcatctttatccctttcctttacgcagtgagttaaagttactgagcaactcatacgtttccaccagcggtaagccgactacggcgtgatagctgccattaatcttcctgacgaagcaaccacccaacccttgaataccgtatgcacctgctttatctaaaggctcgccgctggccacataatcggcgatatcctgctcgctgagccgccggaaggtcacttccgtgaccaccagacagtccagcgtttgctgcttatccgccagcgccaccgcggtcatgacctgatgggtgtggccggaaagcaaacgcagcatcgctgcagcgtgttcggcgtcgcgcggtttttccagcacttcgccgttcaaaatgacaatcgtatccgctcccagcaccggcaaatcgcgggtggccatcgccaccccggcctgcgctttttcgcgcgccaggcggacgacatagtgctgggcgctctcctgcggctggcgctgctcctcaataccaggaaccagacgctcgaaagcgagaccaagctgagtcagcagttcctgccgacgcggggaaccagaagcgagatacagagttgtcatatcaaccttattgcactgcaaattgctgacgcactttacgcatcagcaggaagagccatggccagaggatgccgtttactacactactccagaatacttccggacggaaagagacgttgatcactaaaaactctgcccagaaaacaatgatatccacggccagggataacagcattaccaccagcgcctgttgccacagcgccaggttacggaacagctgatacttcagcgcgaccagataggcgacgatgcttaaagacagcgcgcgaacgccgagcgttgaaccgctgatgagatcaagaatagcccccatcacgaaacccgtccccacgtttacccggtgcggcaacgcgaggatccagtacagcaggatcaataatacccagttgggccggaaaacgctgatgtccgccggccagggcataatttgcagcaatagcgcgataagaaacgagagccagataacccagcgtccctggctacggtaacttgccactattgcccccctgcaggctgcgacggctgaggcggcgtcaacccggtggcgggcgccggcatctgcggccccatcgcatccggcgcaggcagtacctgcggcatcatctgcatcagacgttcgttagccacccgatgaacctcttccggggtcatcgggttagcgccattacgatcggcgccccacagcagcaacagatagcgcaagcgctgcagcccggccgtcggacgcgcctgaatcacggtataggcgcgctgggtgtccagtttcaccgaggagactaccccaaccggatacccttcagggaaacgaccgccgagaccggaggtcaccagcacgtcgccgacgcgaatatcggtattcgccggcagatgctcaagctggagatcgtccgtgcagccgttaccggcggcaatgacgcgaatgtcgttacgcagaacctggatcggcagcgcatgagtggcatcgcagatcagcagcacccggctggtcattttcgccacggccacgacctgccccacgacgcctttatcgctgataaccggctggccttcatagacgccgttcacgctgcctttgtcaataaccacctgatcgctgtaagggtcgttgaccgttgagatgacctgcgtcaccattttttgctcgtcctggcgcagcggcgagccaagcagttcacgcaggcgcgcgttctcctgcttgtactggcccagcatcagcagatcgctgtttttcagcaacagctcctggcgcagcgcgcggttttccagttcgagctggtcgcgggtagctagcgtctgcgatacgctgtcgagcagttcccggggaccattagagacaaagtagaaagggctgacggctgtatccatgtacgttctgatttgactgaacgtacccaggcggctgtcggcgataatcacgccaagcgccaccagcaccgccagaataaggcgaatctgtagcgaggggccacggctaaaaattggcttcataggctatgcgtattctcgtgtcagtaaagaccaggggcagctcgtatgccgccccggaccttcaggctgactactcttcgctaaacaggtcgccgccgtgcatgtcgatcatctccagcgccttgccgccgccacgcgctacgcaggtcagcggatcttcagcaaccacgactggaataccggtttcttccattaacagacggtccaggttgcgcagcagcgcaccaccgccggtgagaaccatcccgcgttcagagatatcagacgccagttccggcgggcactgctcaagggcaaccatgaccgcgctcacgatgccggtcagaggctcctgcagcgcttcaagaatttcgtttgagttcagggtgaagccgcgtggcacgccttccgccaggttacgaccgcgcacttcaatttcgcgcacttcatcgcccgggtaagccgaaccgatttcatgcttgatacgttcagcggtcgcttcaccgatcagggagccgtagttacgacgcacgtaattgataacggcttcgtcgaagcggtcaccgccgatacgtacagaagaggaatagaccacgccgttcagggagataaccgccacctcagtggtaccgccaccgatatccaccaccatggagccggtcgcttcagaaaccggtaagcctgcgccaatcgctgccgccatcggctcttcgatcaggaagacttcacgggcgcctgcgccctgcgcggattcacgaatagcgcgacgttcgacctgggttgcgccaaccggtacacacaccagcacgcgcgggctcgggcgcataaagctgttgctgtgcacttgtttgataaagtgctgcagcatcttttccgtcacgaagaagtcagcgataacgccgtccttcatcgggcgaatcgccgcgatattacccggggtacggccgagcatctgcttcgcttcatgacccacggcggcgacgcttttcggcgatccggcacgatcctgacgaatggccaccacggaaggctcattcaatacgatgccttgtccttttacgtaaataagggtattcgcggtacccaggtcaatggacaggtcattggaaaacatgccacgaaatttttttaacatactaagggataatcctgaaagctggggcggaaaacaaaatccgcttactttaccaaccacacgcagcagcgacaaggcgcaaaaatcacctgctgcggtgaaaattagtgcagttcatttcctttgttacaaattttcccgactccgttcattgctgaaatcttcagcagcgctccacgcctgaatttgtaacctgtcaaaggagggtcactggcatttacattgcgatgatccggcaggtagacaagcacacccccttcacgatggcgcgcgttattctacgtgaaatcacgctaaacggcagatcaaaccgagtatctttgcgaatattttttcacatttgtgtcaagtggctgtgaggcggcaaaaaattccccctgcccgcccgtgacaccgcattgggacagtaccaaccactcgctgcggctgcgtacgcccgtcgcaaaaacttgcataggcatgcctttacaggcttccaccaggctttgcaccagcagttggttctcgctgcgcttttcgatgttgcgcgccagacccggatgcagtttgatcagctccgcatccagctgcttgatccagctggttccaaccagggttaaccccgcctgaaccactgccacccgaacgcccagagcgttaaccaatcgcataaccggctgcagacggccgatatattgacaaacatctgcctctgcaagttcaaaaataatccgctgacgctgcgatttttcacactgcatcaaggcatcgcgcagccagcgctggaaacgcggacggatcagcgactccaccgacagctggagcgccaaattctcctcgggccagaagcctaaaaacggcagcaggcgcgttacctgcaggcggtcatactcctccgccaggccaaactgcagcaccatcggcatgtattccgctgcaatcacctcttctttaccgtcgtacatccgcgacatcagttcacgatgatgtacccgcccgtcgcgggtgacagcaggtttttggtacaaccgcggcccgccgcggctcagcatctgttcgatcagcgttcgccagcgaacgttgccgcgacctttctccggaagggtgtcatcatagaccgaccagctgttgctgccctgcagcaccgcgttgcgcgtcgccgcttccgcatgttccatcacctgcgccgccgattgcccgctgcggaaagaacagatgccgatatgcatcatatcgtcgcgatcgaggatacgcgttggaggcagcgcatccatcgccttcagcaacaggccggcgatactatccgcctctttcaacgtacggtgcggcagcagcacggcgaagtcgctacggtgatagcgcgctaacagcgcgccggggtaacgcataataaaggtagagagcaggttgataagcgtaaagtaatgttcttcggccgccgcccgtccccagttgtcccgtagcagatcaaactccggcagacggatcatcatcacgatgccgtaggctcccaccttctcctggtcttccagcagcgtggccagctgattgtcaaaaaacaggcggttattcagtccggttttcgaatcctgcgccgcgtaggagcgaataagcgtatccatccggctgcgctgatcgctggcgaactgcagctccgacagcagcatatccagcgcgctactggtgctggccggccattcatagaccgacccgcgcacctgcggcccgcgctcgccgctcaggatacgcgtggaacgcagctccagcagctcctggccggccagctggcggcggatccagcggacggcgaagaaaataatcaccaccatgaagccaatggagatcgacagcggggcagtgatcgacagcgaacggaaatagttcaccatcgggtcaacgtagaccagatgcagcgtaataccaggatgtttaagcgactgaaccgtgatctcacggaattgctcatggctgccgagcgggcgatagctatcgggtcgggaatggctgtagagcggtttgccgttgagcatgaaatcgatatgcacgatctcgatcggcgtcatcagctcatccaactgcggttcaagcttatcgaaagaggtggtgatgagccggttatccagcatggtcgccaccgcctgaacgcggttttcgaccttgttctcaatgccgttataaaaactcagcgaagcgccaatcagcgtgacaaagatggtcaggctagttagcagcgtaataaaggctgagaacttcgtcgttaatcgcatccctgtgttaactccgcgagtgaatgactacccgatgaaccatcaggctcccgtgccggcgcgcgccttgccgcaagcattaaccttttaaagcgcgacgcatactatcaaagatggcgagtctggcaatggaatgcgtattatcggtaaaagtatgccgatagcgagtatagtttgcagaaaaaatttgccaatcgtcgccagcctgcggcctgcgccagaagcgctttaattttagacgcaggatggcaaacccgcgccaacgacgcaaattattaccgctataccgtctggccagcttaccgcccccttttccctgctaaagatgccgggtcatgcgcggcaaaggaaacgccttgcgccactttccgatgattcctggacgaccgcgcctctgcttcggcggcggctcctcatcctaatgtgcaatttttcgtgacatattcgccattcatcgccgtctccgtcatgcttaggaaaacgcatgacggaggacaccatgaaaagaaaaaaactgacggaagccgacgtcacggccgaatccgtttttatgctcaagcggcgccagatgctgaaaatgctgggcatcagcgcgaccgcgctttcccttcccgccgccgcgcaggccgacctgctggactggtttaaaggccacgaccgcccaccagcgccagcgggcaaggccctggagtttgctaaacccgccgagtggcaggctaatttgacgcttaccccggaagataaggtcgccggttacaataatttttatgaattcggcctcgataaagccgatccggcggcgaacgcgggtagcctgcgcaccgatccctggacgctcaccatcggtggcgaagtggcgaaacctctgacccttgaccatgacgatctgaccaaacgcttcccgctggaagagcgcatttatcgtatgcgctgtgtggaagcctggtcgatggtggtcccctgggtcggcttcccgctgcataaactgctggcgctggtggagcccaccagcagcgcgcgctatgtggccttcaaaaccctctatgctccggatcaaatgcccggccagaaagaccggtttatcggcggggggctcgcttacccttacgtggaggggctacggctggatgaagcgatgcacccgctgacgctactcaccgtcggggtgtatggcaaagcgctgccgccgcaaaacggcgcgccggtccgcctgaccgtgccgtggaagtacggttttaaaggcataaaatccattgttagtatcgagctgacccgcgagcggccgccaaccacctggaacctggcggcgccggacgaatacggcttcttcgccaacgtcaatccgcacgtcgatcacccccgctggtcgcaggctagcgagcggtttatcggcgccggcggcgtgctcgatgtgaagcgtcaaccgacgttgctgtttaatggctatgccgacgaagtggcgtcgctgtatcgcggcatgaatctgcgggagaacttctagtgcgtttcaccgtcaaacagatcgtctggctgaaggttttacttcaccttgcggggtttttgccgctggtctggttattctgggccgggcaccagggctactttagcgccgatccagccaaggatatccagcactttaccggcagaatggcgcttaagtttctgctggcgacgctgctggtctctccgctggcgcgctatgcgaagcagccattattgattcgcgttcgtcggctgttaggtttatggtgttttgcctgggcgacgctgcacctgaccagctataccctactggagctgggcattaacaatctggcgctgctgggctcggagattatcacccgcccctatctgacattgggcatgatcagctgggcgattctgctggcgctggcggtgacctccacgcaagcgatgcagcgaaaactggggcgtcgctggcaacttttacacaacttcgtctatctggtggtgatcctcgcgccgatacactacctgtggtcagtgaagatcgtctcgccgcagcccgttatatatgccctgctggcagcggggctattgacatggcgttacaagaagttccgccagtggtggcgcgcaatccggtaatgtgcagtttcccgcagatcctttatcaaccgcgactctttttcagatagcggttgataatcttccctgataagaccagtatttagctgccaattgctacgaaatcgttataatgtgcgactttggttttcctgacggggttttctgaccctgaaaaggtgacaagggcgcattgaaggtatatgttgttttttacccgaaaatggcaggagatcgccacacaatggcagtgaagtttcacattttgcttttgaatggtccaaacattaacatgctcggtacccgcgagcctgagaagtatggccctctcacgctggctgaaattgttaaccgtttaacatctgaagcggcggcgctgaatgtgagtctggatcacctgcagtccaacgcggagcatgcgttaatcgaccgaattcatcaggctaaagacaacgtggactatatcctgattaatccggccgcgttcacgcataccagcgtagcaatccgtgacgctttgctcgccgtgaacatcccgtttatcgagattcacctgagcaatgtgtatgcacgcgaacccttccgccagcactcgtatctgtcagatgtcgccgctggcgtcatttgcgggctgggggcggatggttattcatacgctttacagacggcggtaaaacgcctgtcacaatcacactaaacaaagagtacggaacccactcatggatattcgtaagattaaaaaactgatcgagctggttgaagaatcaggtatctccgaactggaaatttctgaaggcgaagagtctgttcgcatcagccgctctgcaccggccgcaagctatccggttatgcagcaggcttatgctgcgccgatgatgcagcctcaggcgcctgccgccgcgactgccgcaccagctgctgcggctgaagcgccggcgaaagcggaaatcagtggtcacatcgtacgttccccgatggttggtactttctatcgtacgccgagcccggacgcgaaagcgtttgtggaagttggccagaaagttaacgtgggcgacaccctgtgcatcgtcgaagcgatgaaaatgatgaaccagatcgaagccgacaaagccggcgtggtgaaagccattctgatcgaaagcggccaaccggtagaattcgacgagccgctggtagttatcgagtaacgaggcgaacatgctggataaaattgtcatcgctaaccgtggcgagatcgcactgcgcatcctgcgtgcctgtaaagaactgggcatcaagactgtcgctgtgcactccactgcggatcgcgatctaaaacacgtattgttagcggatgagacggtctgcatcggtccggctccgtccgtaaaaagctatctgaacattccggccattatcagcgccgctgagatcactggcgcggtagcgattcacccgggttatggcttcctctctgagaacgctaattttgctgagcaggttgagcgttccggtttcatcttcatcggcccgaaagccgacactatccgcctgatgggcgacaaagtgtccgccatcaccgccatgaagaaagctggcgttccgaccgttccaggttctgatggcccgctgggcgacgacatggacgctaaccgcgcccatgccaaacgcatcggctatccggtgatcatcaaagcctccggcggcggcggcggtcgcggtatgcgcgttgtacgtagcgacgctgaactggcgcaatccatctccatgaccaaagcggaagccaaagcggctttcaacaacgacatggtctacatggagaaatacctggaaaacccacgccacattgaaattcaggtgctggcggatggtcagggtaacgcgatctatctggctgaacgcgactgctccatgcagcgccgtcatcagaaagtggtcgaagaagcgccggcgccgggcatcaccccggaactgcgtcgctacatcggcgagcgttgcgcgaaagcctgtgtggatatcggctaccgcggggcgggtacctttgagttcctgttcgaaaacggcgagttctacttcattgaaatgaacacccgtatccaggtagagcatccggtaactgaaatgatcaccggcgttgacctgatcaaagagcagctgcgtatcgcagccggccagccgctgtccatcaagcaggatgaagtggtagttcgcggccatgcggtggaatgccgtatcaacgccgaagacccgaacaccttcctgccgagcccgggcaaaatcacccgtttccacgcgccgggtggctttggcgtgcgctgggagtcacatatttacgccggttacaccgtaccgccgtactatgactccatgatcggtaaactgatctgctacggcgaaagccgtgacgtggcgattgcccgcatgaagaatgcgctgcaggagctgatcatcgatggcatcaaaaccaacgtcgatctgcagatgcgcattatgagcgacgagaatttccagcatggtggcaccaatatccactatctggagaaaaaactcggcttgcaggaaaaataattctgctctctcagcaaaaggccgggtaaaccggccttttttctttttctctctcctcatctataccatgcggtacaatccccgctttcttcatcctcaagggacaaaaaatggacaaacgctttgttcaggcccacaaagaagcgcgctgggcgctgtggctgacccttctctaccttgccgcctggctggccgccgcctatctgccgggggtggctattggctttaccggcctgccacactggtttgaaatggcctgcctgctggtaccgctgctgttcattctgctgtgctgggcgatggtcaaactgattttccgcgatatttctctggaggacgatgatgcagtttgaggtcattattcccctgatcgcctacctggtggtggtgttcggtttatccctctacgccatgagaaaacgcgcctcaggtagctttcttaatgagtactttctcggcagccgctcgatgggcggcttcgtgctggccatgacgctaaccgccacctatatcagcgccagctcatttatcggcggacccggcgccgcctataaatacggcctgggctgggtgctgctggcgatgatccagctccccgccatctggctgtcgctgggcgtgctggggaaaaaattcgccatccttgcgcgtcgctataatgctgtcaccctcaatgacatgctgtttgctcgctatcagagtcgcctgctggtctggctggccagcctgagtctgctggtggcctttgtcggcgccatgaccgtccagtttatcggcggcgcccgcctgctggagacggctgccggtattccttacgataccggcctgctgatcttcggggtcagcatcgcgctgtataccgcctatggcggctttcgcgccagcgtgctcaacgacacgatgcagggcatggtaatgctgatcggcacgatcgtgctgctggtgggcgtgatccacgccgccgggggggttggccatgcggtagagacgctgcagtcgatcgacgtcaagctggtgtccccgcagggcgcggaggatatcctctcgccaacctttatggcctcgttttgggtgctggtctgcttcggcgttattggtctgccacataccgcagtgcgctgtatctcctacaaagacagcaaagccgtgcatcgcggcatcattatcggcaccatcgtggtggcgatcctgatgtttggcatgcatctggctggggcattaggccgggcggtgatccccgatttaaccgtgccggatctggtgatcccgacgctgatggttaaagtgcttccgccctttgccgccgggatcttccttgccgcgccgatggcggcgattatgtcgacgatcaatgcccaacttctgcaaagttccgctacgatcatcaaagatctgtacctgaactggcggccggatcaggcgactaacgaaaagcggcttaaacgcatgtccgccggcatcacgctcctgctgggggtcttgttgctgctcgcggcctggcggccgccggagatgataatctggctgaacctgctggccttcggcggcctggaagccgtcttcctgtggccgctggtgctgggcctttactgggaacgcgccaacgcggctggcgcgctgagcgcgatgatcgtaggcggcgtcctgtatgccgtactggccacgctgaaagtgcagtttctgggctttcacccgatcgttcccgcgctgctgctgagtttgctggcgtttgtgacggggaacagtttcggtcgtcccgccccacagtcccccattttgactactgataaataaagagttttgctatgccatggatccaactgaaactaaataccaccggcgcgaacgctgaagatcttagcgatgcgctgatggaggccggatcggtctcgatcaccttccaggatacgcacgatacgccggtatttgagccattgcccggggaaacccgcctgtggggggataccgacgtaatcggcctgttcgatgctgaaaccgatatgaaagcggtcgttgcccaactggagcagcatccgctgctgggcgccgggttcgcgcataagatcgagcagctggaagataaagactgggaacgggaatggatggataacttccaccccatgcgcttcggggagcggctatggatctgcccaagctggcgcgatgttccggatgaaaatgccgtcaacgtgatgctcgatccgggtctggcctttggcaccggtacgcatccgacgacatccttgtgtctgcagtggctggatggactcgacctcaacggaaaaacggtgattgatttcggctgcggctccggcatcctggcgattgccgcactgaagctgggggcggcaaaagcaatcgggattgatatcgacccgcaggctattcaggccagtcgtgataacgcgcagcgtaacggcgtttctgaacgcctggagctctatcttcctcaggaccaaccggagtcgatgaaagccgacgtggtggtcgcgaatatcctggcaggcccgttacgtgagctggcgccgttaatcagcgtcctgcccgtttcaggcggtttgctggggctttccggcatccttgccagccaggcggagagcgtctgtgaagcctatgccgatctcttcgcccttgacccggtggtcgagaaggaagagtggtgccggattaccggccggaaaaactaagcgcgatgcggcctacgggccgcatttttgtttccagtagccaccaaataatgccaggaaatgagaggcagatcgcactacagagcacttttttggctacaaaaacagcgttttatatcgccatgcggccagtttatccaagaaaaatcgagaagttttatgattttataaatggacacaaattatccatcatccattaaatcaatgattaatataagtatttattcatcccttttacgctagtcccggattcattgatctgcaacagaggattgctcaaagtttggcctttcatctcgtgcaaaaaatgcgtaatatacgccgccttgcagtcacagtatggtcatttcttaactcatgcgcatcggacaccaccagctcagaaatcgcctgatcgcagcgcccatggctggcattactgacagaccattccggacgctgtgctacgagatgggagcgggtttaaccgtttccgagatgatgtcttctaacccacaggtgtgggagagcgacaagtcccgtttacggatggtgcatatcgatgagcccggtattcgtaccgtgcaaatcgccggtagcgtgccggaagagatggctgccgccgcgcggattaacgtggaaagcggcgcccagattattgatatcaatatgggatgcccggcgaaaaaggtgaatcgcaagcttgcaggttcagccctcttgcagtaccccgaccaggtgaagtcgatcctgacggcggtcgttaacgcggtggacgttcctgtgactctcaagattcgcaccggttgggaaccggaacaccgtaactgcgtagagattgcccaactggccgaagagtgtggcattcaggctctgactattcacggacgcacccgcgcctgtttgtttaacggagacgctgagtacgacagtattcgggcagttaagcagaaagtttccattccgattatcgcgaatggcgacattactgacccgcttaaagccagagctgtgctcgactatacaggggctgatgccctgatgataggccgtgcagctcagggaagaccctggatctttcgggaaatccagcattatctggacactggagagctgctgcccccgctgccgctggcagaggtgaagcgcttgctttgtgcgcacgttcgggagttgcatgacttttatggtcaggcaaaagggtaccgaatcgcgcgtaaacacgtctcctggtatcttcaggaacatgctccagatgaccagtttcggcgcacattcaacgccattgaggatgccagcgaacagctggaggcgttggaggcatacttcgaaaattttgcgtaatagaaataaagagctgacagaactatgttcgaacaacgcgtaaattctgacgtactgaccgtttctaccgttaactctcaggatcaggtaactcaaaagcccctgcgtgactcggttaaacaggcactgaagaactattttgctcaactgaacggtcaggatgtgaatgacctgtatgagctggtactggctgaagttgaacagcccctgttggacatggtgatgcaatacacccgtggtaaccagacccgcgctgctctgatgatgggcatcaaccgcggtacgctgcgtaaaaaactgaaaaaatacggcatgaactgatacatttcagctatgttattgaataaaaaggcgctactcggcatgggatagcgccttttttattaatgtttatacagatgtttatacagctttgtctgaacaaacaaaaaagcaccagaacaatactggtgctttatggggatgaacctctttcaacgccttaatttatcgggctttttccactgatagggtggcgcttccatccgctggcggtgccgctgtttagcggccaaaaccatagctgttttagtgcggattaccagcttatcctgcccgttaagttcatggcccaattgacgtgccatttcgtcgatcacagattcaattttcttgtgtttgagcatattcaaatcccggtaaattcggcaagtcgctgcttatggctatcgctcatatcgaatgcaaaatcctcgtgctctgcctggaatgtgccgaacgccataagcgcagaaaccgcagggtctatcttgttagaggatttctttttgttgggcttgatattggcgttggcgtcggactccatcaccacgtttccaatcgcccaggccagaaccggatcgccacgatggcgcaccaccttgcggttaacaaaaacctcaaaggatttcgctaccggactgaacttgagataggtttgcgggaacggctccacatcaagccccgccccctgtagctgggtgcgcaggtgtgtggcgttccacgtatcaaagcccaccagccggatattgaatgtttcagcgtcgcgcaggatatcgtcacggatgcggtcatagtcgatacagtcgccgggggtggtgcgtatccatcccgcttttacccactggcgatagatggcgcggtttttgttagcaacgttaagtagctgcgcttcgggcagatagtgccgggtaagaagcctgatctcgcgttcaaacgggaaagcgtaactcacgctggtaatatcgctggttgaggacaggtcaaacccggcgtagcactccattccggccagatcgtcttcggtatagtcgagcgcacaggcatcccatgcgccggcccccatccacggcgtggagccctggcaccagatattgaaacgcttggtcagcatctccacccactgcgacggaatgccgcgcgctttctggatggtggattccagtttcgccgcgtcaacggacacatgcaggttagggttagccttgatccacatttccggctgctcaacctcgctttcgtcgtccagttcgtagatcaggacaaacagcgagtcattgctctcttccccggccagaatctgacagcagtagtcataatgctgtttacaggcggagacaacgttactcccggctgtcgtgatggcgaacaaaatcgcctcaggacgtgcgcccatacccagctcaagggcggaataaacgccgttatccgggtgaaggtggtattcatcgacaatcgccaggctggggttagtcccttcaatggtggccgctttcgccgccagcggctttagcaggctgttgctcttcgggaaaatgactttatgcgcctgaatatttacgcgctttttcagcggttttgacagcaggcacatctggcgggcatcgtcgaacacgattcgggcctgatcccggctcaccgccgccgtgtagatatcctgctggcccttctccattaccagaaaccagttagccagcatggcggctacggtggatttggcgttcttgcgcggcacctcaataaaagcgctgctgtacttacggcggcctgtctctctgactttaaagcccagcaggttagcaaaggcgaactgctgccacggttccagatcaattggctggccccgaagcgggcctttgacgtgaggacagagccgggagaacgcaataaaccgctctacggtcgccgtatcgaactcataacgagggtcattcaggtcggaaaagtacctttccacggcctgttttacgcgcttacaggccggaatttcgcccttttttatcgcatttgcgtactcattccagacggtcaagctcgtcctcctcttccgtttccaccgggttacggcgacggcttaccggatcaaagcccagcagcgacgacattttaatcatgattttttcagcatcggcctttgcactcagtgccggatttcggctctcgccaccctggctgttaacaatgctgaacccacggctggcaaggtcttccacggctttgcggtacatcgaatagttgacgcaaaaaagctcaaggttgttccagtcggcgggtgtcagatcgccacgctcggccagttgcttcgctttcgctttccactgctgcgcggctaactcatcaaggtaagctggcggttttggtggtcttgccataaaaatttctcgtttccatcgcgttttattttcaaaaaaatcaccgtgcgtaaaaatttgagggggcgggtggtgcctggcgccctcgtgttcgtcctgaaaacctcccccaccccatcggtgcggcctgtcagcggttgcggaagcattcccgcaactcccggtcacgctcactcatgcgctgcacaggctggcgctcatcgcgtctggtgcgggtctgcatgaagccatcacggcatcgggccagcgactgatacagattcaccacgtctttctcattcatgatcaacctcatacatccagttattgcgctgtgctgcccgctcttcctgctcgtggtacatccccgctttgcggttggctttggtgatagggtcttgctgtgtggtcttctggttatgatgcgtctggcataacggctggtgattccactcaggccagaacagaacatcatcaccgccgtcgatagggatgatgtgatcgacaatctttgcaggaacgtagaggcccaacttctggcactcgacacatagcggctgacgtttcagatactgagcgcggtacttctcccatgatgctgagtaaccacgggcgcgacggtggccgcgtctggcatcttccgcccgccaggcttcgcgcttgtgctcatagcacttaccagacttcacccgcttattgcatcccggctcagtgcaccggcgcattggttgccacggcatcagtacacccccacatcgcgatacacagaccacaatgcagagatagcaagggggatctctttcgcctccacatcactaatcatcgtgcggtattcgtacagttgggaaacgtacataaggcatccgatcttgatggcaggagtaaattccaggccagcaccgaaccgtttaccgatatgcttctggcagacttccagtgacgcttcgatgtatgcctgaatcattgcatcttcataggaatcatcgttatcgatgcgacagtgaagttttgcctcatcaagcccaattagttcactcacggcttaagccctcccttacaaagcaactccagcctggtagccttttcatcaggaattgccgactgaatatcaaatgcttttgcatcatgtcctttctgtttccagatgatccggctggcgctggttacgtcagagcggtaacgtacccacatacgaaatgtaacctcggacatttcagcacccgcagcaatcagctcacggccactgatccccttaacttctgcccagactgtcgcaacgtcgtaccattcctgaatgacgccaccagaaggggttcggctggtagtaaaattctgaatcgtaacgcgttgccttaatcctcccggcctcatgacgcatcctccttattctcagaaccggtactgaccttcacttcctgcttccatgcctggctgtattcgtcgcccccttcacgcggcggcatcccttcgcgttcgcgggcttcgttcgggttcatgatcccgttcttgataccgcgctcataagttgcgtaacgttcggttggagtggctcgaagaagatcggcagagtcgaactccacctgataacgaattccgggtacaggcgatgccaccagcaacgcggatttaatctgctgctcaaagttcgccagccacgggcgcattgtcatggtaagaaaggcgcggctcgcctcactaaaattgctgtaggtgctgttgctgtattcctgcaggaagatgggagaaacgttaaacatgcgggcaatatcttcgatggtgaagcgccgggaggccagccactcagcatcctgattgctcatgccaagctgcttatagtccatgccaccttcaaggatcggtgttttaccggcatttctggcacctttgtagcgctcaagcgcgtccagcgcctgcttacccttcacactatcgagccattcagcagtagtgactacgcccgccgccatcatgccatctttcataatgctggcaccgtggcgctgctgggccagacctaaccccagcgcttcacggcagatggtgatcggcgagcgccccagaaaaccatcatcggtcgagtaacgcaggtgcagaatctcttcctgcaagtaggtgcgcactgccccggtaaacggctcagtaacagtgtatttgtacttatgctggccgatacgctcaggaacaacctcccccggcgcatacggatgcagggattccggctgaccgtcgcggccccactggatcaccgcataggcgttaccgttcagcagacaatggcgcatcatcgtgcgcttgaactggtaaggcgtctggcaatcgttaggttgctcattcaggagaaaatctaccggatgattactcaaccactctcgcgcttctcgcccgttatcgttgtgcacgcggtagagatagcagggcattgttgccactgcctcactgataactgacacggcattcatcaccgccggcagggattccgcagtaccggcagacacatattcgcctgatccggtatttggaatccctgccatcgccagaaactcatcaatcgtcatgctgcgctgttcggatggctcagatttacggccaaaaggccagatattccacatatcacagccccgctaagtcagcccagcgtcggcggttatcaccagcacggcgcagttcaggatgttgggagaacagagaacggtgcgcaatttccacgccggactcagggtaagcaggcatagaagtaacggtgatctcccgcagctcggcagcggtaacagtgcgaatatacggtgtaggagtaatatcccaggactctttcagcgcacggaacccgaagctcatgccggaaatgtctccacgctccaccagctccagcacatcattgccaagttgggtgtttggcggggtcagctcgaaacgcagcccggtatcatcttcggacaacaccagcgtgccggatttggtacgccccagcagttgggtatagttatgctcgtacagtgcacgcacatcgctaccggatgccaggctgtctttaaacgcccccggcgcaaactgctcgcggaactcatcccagatcacctctgacaggctgttccagcgcacggcatagcccaccagctttttgttgctggcgctcagttcggaggtacggatttcaaaatcgattgttttcattgttggactccacaaagggcaaaaaggggccgaagccccttaaacgtcagatcaggaacctgaaccggaaagctcaagcaccttgatggcgttggagtccaccacaccaccgcccaggtatttatcggtatgcaccttgtagaaaccaggttcggtgatgttgtcggggcgggtacgcacgccagtagtgtgatccacgataaagtaaccgcgcttaaagtccccgactgccaggaacgcttcacccgcagccgcatcaggcatggtttccagatattgaaccggacggccaaggagggtatcgggagagtcagcgacgagacgatcacgccagatgtaatccccgttgccgtttttcagcttttgcagcgtagcggcagtattggagttcatcacccatacggcatttttacggtatttggctttcagcttatacagcaggtcgatcaagccatcagaggaaacggcagcagcttccattttctccagcgttccgaacggacgggttttatcgctggtggccgcacgcggataggacaggaaccctttggattttttatcaccgtcgccgttcacaaagtcggtttcttcggtagcagtgaaggtgtcggtgatttcggaagacagccaacccagaatatcaacttcggagaagtcgagaatttcctgagtggttttcgggtaggcgtagatcgggttgagtttgatatcaacgcgctccatcttaggtgtgctggtttcggtacgcgcttcgccttcggtgccgcgcttaacggtagtgccacccactgataccagcttctggtattcgttggttttggtggtcttcaccgtagcgatggagcgcatcacgctgtcatcctgcaactggcgcatgatctctttgtccagctcagggataacggtatagccgccgtcagcctgcaccaacgtggagagagagcgggtatcgccggtcatgatgtagtggcgcagctcatcgttgcttacacctttaccttcaacagaagtaccaggcagattgcgctgatcgtcggcgacggcctcaaggcgggtaatttcaacttcaagcgcatcagcctgggcgcggagttcatcgaactgcttgccctcttcatcgttcaggcttcgcttttcgctgtcagctttttccagcatggaacgcatctgggttttgagtgcggctttctgctggcgtaattcaagtaatttcttcatggagtggtttccgtaacaattaacgttgagacgtgaaaccagcgcttggagggatgtccacctggaaaggaaaccgtcgcagaacgggaaaaaaaccaggtggacagtggcggctcacgtctgagtgccactcttcaagatatacataataatcaatgagtaaacacctctatgttgtcgcaaacagcagcgaaaacaggagaacaaataatttacaaggtttgataatatgaacgggaaaaacaccacttctgggggattttatggacttcgattttgacgatatggcatacccggatatttttttaatttccggcgaggagtttaaaggaagcaggaacacaggaaaaaatcaggtagatatcccgtttactgacgaaccgcaaattgaattgggtgatattctgattcagaagattggaagccgcgagttaagtcttaaagttgtcgatctttcaatatcaaagaacggaacgctgaacgcaggtacaacgcatcctcacttacttacgttatccgtagagaatctttcttccgacgcacacaggacagcaaagagcatgaatacttttaatattggctccgtcagtggtgagcaagttcaaataggtgaaagtaatcatatgctggtgaatatcagtattactgaacttgtcgagaaagtagctaaatctggcgatccacaggctaaatcaatgttgaaacagttactggaaaatagcaccgttgccagtatcgttggcgctggcgcttctgcgctgttaggtctgctttaaaatatggcctgggaaaaaaccaggcctttagcttatatggctggatgattattctttatccagcccccactgatagaaagcccagcttgctgttgattgtgcgctatggatagcgttctcaaggccagaggttgggtacgacaaatcagccgcaatcctctgtagaagatcgaggtaagcgctggcgtctttcgacaactcttgccccccttcttccagcccagactggtacgattccagatcaagtttttcagaagtgacaaaagcgctcagagccagaaaatccgtcaccgtaatctcatctttatttgaaagctcatcaacggcgctgtagagaaacttgagatcgctcatatgcccgttatctttgccaatcagtttcattaatgacctctttatttttcacgtatatatacaaaactatgttggttcagtcagttcagttggttcaatttgtaaagattattgttttataaggattatttttcgatgagtgaaccaacaaagccccgatttgaaccaacattgggtattttcatgttggttcagtccatgaggttctaaaatgttggttcaaactgcccgtttgttggttcaaaactgctatttgttggttcagtgttggttcatttttttgacattaaacccatataaaacagccatatgaacataaccaatagacactgaaccaactgaaccaacattaacaaccctcacatgtgtaatttattcttctccaccttccgcaacctggtgaagcacataaacgttgatttgacgcccatcaatacgcggggatttctgctggtatccacgcccgctggacggctcagaaagcaagccagcagcggcaagcacgcgggcaaactgcctggcgttaaagccctgagctatctccttctcaaacgttgcggggaacgtatagaacaccagcggcgcatcatcatggctgcttttgcgctttcgatacccggccagatcgcgaatcggcatactggagggatcatagggcaacggtgcaaagcggcttaaaccgtaggcattcaggaacgcctcgcactgctcgatgatctgctggtgctctttgttaccagtgccgaactctttcacccaggcgttaaagctatgctggatagcgtcacggctggcctgttcactccatccggtgattgatgcaccagttaccagcgcggcttcgaggattgcaaagcgttcggccacgcggtgtacctgctcaccgtaatccgccgggatgaggccgcgccagcgcgtttgcgcgtcacgtaccgcctgtttagcctcctgctggttagctgccagccatttaacccactcacgccccgccgccccgtggttatcaatccaggcttctttcaatgcgtcagcatgagccttgccgtttggcagaccgttaaaggccgtcgatttctccatagggatgttgagcaagcgcaccagttggcccgctttcactttcagcccaccagcagccaggaaggtttcaatatccatttccccggtactgatcgccacagtgcgccagcgtttaagctcccgattgccgccctctttggctccctgcaactttccggcgccgttaaacagggtgtaagcagacgtggcaacatctttggcactgctgccctgtcctacctcatcaagcggtaacaggctgtcgttatgcgcctccgcttcgtttgctatgccaagcgcagtaccgtaccaggtaagccgcaacgcatcaggctcaccccacaggctgctcgcaatattggcggtagtggtcttaccggcgctcgactgctcgaacaaatggacgccgaaaccatcagcacccaccaggccaataagcggcgcggataatgccgctgccacgcccagcatcatggacggattgcccccggccagacgggcgacggaatcccgccaggtagcagcagtaccagcaatggcatacccggaagatgcagcgctgcgaccgttaaagagaatgggcgtctctggatcaccaatcacttcaccatcaggcatgatatatgcgccatgatgccagccagtggtatgggtgataatccattcccgatcagtgccgctttgctgcaaccagtcggccagaatcgcccggaaggtgcttttagtggtcacattcaccccaccagctttaagtgagcgccagccgtcgcgctcaccgatatcagcacaggggatcgccctggtaatatcttcatggccacgcggcgaacgccagcgcaaaacaagatagcgctctgccccgtcactaccggagccgaccacctcaagaggcgagcacagccacgtttcgttattgatgatctcgccactatccttgtccacctttggcgtgatccagtacaggccatcgctgcggctttccacgcggggtttgagttcatcgcccggttcaggctttggctcccgttttttcacaggcaggttcaccacaatactttccccgcgttcggcctcttctttgagacgtggaagcctgcccgtccagtcctccttcggctgaggctcaaacatgccattaaacagccgggcctctttcacatccgccagcgccaatttggttgcgatagtgcttatctgcatttcggaaagctcgccagctcggatcacacgaacactgcgacggccgttatcaacgatgtttaatcgttccagttctgccagttgccttttgcccagataaacaggcggtacatcatcccacgcccttttaccttcgctctcgatccagtgctgcacatgtgaataggcatcttcacccgcaaagataatcgcctcagtaaatttatctttcggcagaaatttgatattcggggcattcttcatcttcatcagtgcaacaccttattggacatatccgcgcccaggtcttcatgcaggtactcaaggtggcagcttttcactatctgcaaccccatttcgttaatatcgccatcgtcggtaaagcaggtcagcagaatatcccgcaaacgccttaacccctcatcgcgcccgaattcttcaaagcagccaaaaatcatatatttcatcaatacgttttcagttacgcgcggctccagcgtgaagcgatagcgggccatatacttatcgctttccaccagcaaggttgccgaaccggtttccgctatctggtgagcaatacaggtttcggtcagtttgcggaacaatgggcctatcacttcaaaaatatcggtcattgcgggatacctccgctcatctgaaatttgccaagtaatgggtgataccagtacgccgatccatatttgcgcttcgcgctgcgcagaacctgcctcgccacctctctgaacttgttatccggcgcgataaagccaccagctttcattctgaccagcatcacgcccgtgttttttgccagctcttcggcttttttcgtcgatatgccgaactcagccgccagcgtggcgaccggagccataccgggaggaatatctcccccctggctttcggtgagtgtgcgcacctgctgttctaactccaggacgcggttaaccagcaaatcgacacggttttccagctcgttaaatttcaagagactgatcatgattgctcccccgcgttattacgctgggtacgcacataatccgcagcatcactactctgattgagtgcttgcgccattctgggaaggtgacgcaatgcatggcttacaaggatcaaatcacgccgggcatcttcatcggaatagtcctctgcattggttgcatcaaacgccagattgccgatcagtgtgagcgcactattgatggcaaatgcgccagcagaatataaatcgctggattcagccaaagcctcatcagtgaagtttttaaaatcaggagtgctcttaacaagctgatggtaaatatcacgcatgggtcacctcacttgccgcttttagttcacgaacgcgggacaacgacatgctgatcagatccatcgcaacgctgtactcggtttcatcatcaaaattcatatacagcgatgttgagagcaacgcttccaggcggcgcagttcatcttcaatgtcaatttccgaccatttgaccttacgcatgacgcacctcctgaatcgcggcgctgtcgaactcccacccgcggcgggtggtgtaatcgaagaacgcaacgcggcaaggagcctgagcgcggattttggcggcaaaaactaaatcccagccggggaaagcggcgcgggctttagcttccgtgtcagcatcaaagcgaagcactactggggtgcattcaggagtgtgatctggggttgccaggaataaccatgtaaattccgggcgagtttgggtagactgattgtcagccataactgttacctcacttaacggtttggtgagacgcctcggtactgctcgaacagtccggggcgttgtttttttagatagcaccgtgttaaggtgtgtacctattaaagaaaacagtacgccaataggtacgcacatgtcaacacccattaaacgagatcggcaaccaaaaggagcggggaaagcaccagcgttccagattcgaatcccccccgaacttaaagagcaatttgaaaaagaagcccaagcagagagtgttagcctcgcaaattggatgaaggaattaggccgggaagccctccgaaagaaaggtattgagccaaaaggctgaataaaatcagcgggcgcagaattgcgctggctcattctttgaccaccagcattaaccctggtatgcttaatctgtttcggtttttcgtagtgacattggcagctctgcaaagctgcctttgttttattcagcgtcagcattcggcacctccggcaatacaccaccagcgatcagtcttttcgttaaccactgctcacccttccccgtcagcatcgttgtgaatgaggctcttacctcgccattcgtttcatacgttccctggcgaacggcaaaataaccgctatcgatataacgctgcataggcaggttgtggcgctggccaccattgatgagaatcccctgttgcctcatccagccgaataatttgatggggccaagccctacggctttggcatagtttggaatggaaatccccttactgatctccgccacgcgatcagcgaaatcaacttttggcgcagcggccaccagccggttttcaagttcgcttgccttttcggccagatcagcagcaaggcgcagggcttccggtaacgtctgggggatattagcggcggcttttgcctggcgttcgcagttgatgaaatagcggcgcacctcccgccctttttcgttgcgctcaaccattgccagctctttacccatgtcgatggtgatcaggtaatcatgtgcaatttgttggcgatattttgcgctccccgaaacgggggcgctcaaattttcaaccaccgtaaaatctacaccagcagtaaaaccatactggctgatacgccccttaatccatgtggtgaaatcacgcccaacgccgagaaactcatggagtttttttgcactgaccagcgataccgtcacgccgccaatatttccggggttaaccggaaccaactcatttaatttttgcatagcgccccccttacgcggatttacggttgtaaggggtgttgacgttctcaacagcaggtggattgcgaacccaccaaagaacatctgacagaagccatgcgcaactattacggccaaagtggcagcgtggcgggaatttaccttcgttctccatataccagcgggtggaacgggaaaggctggttatttcgaagcattcactttcacgaatacggcgatcaaacttaatgccatattctgcgagaatggtgcggcgttgttctggtgttggcggggtaaaacgagtatttgacatgcttcctccacttaacgcaatcagaaggagcctttcctgtctgttcttgcgttgtgggggaagtatttgtctaaagtaaattaataaaaatggcttctaaaatttaaaaaggcgtgtttaattctaaaaagggtaatctaatgattagaacaccctttctaacgtttagaagctactacaattaaaacttaaagtgcctactaatgtatgaggtaattgtgtcaacgctcttgaccgggcattgtccgtcaggaaataagtgcactctgtcggaaagttctctggcccatgctgagaaattgtagctcccatcttttttcaagcacttttcattgaaaatatcagaacttgtttctttgaattttattgcagcacttaaaattaatagttcatttcgtgcatgtttttcttttgcactttctgagcgtttattaatactattttttgaatcagagtctaaatcaggtcgttcaatatcattgagcattggcagcttatcgaaatcaaggccgctttccataagccgtttaatatcataattagtaacccataaatcatcatacccggcttcaaactcataagggtcgaaattaaacctcttgccattagcctgatcgataaaaggttgggctggcagaatctgaattactggagtttcaccgcccgtgaggcacgggaaaaatccggggaaaaaatccttcacaggtaaagatgactcaaactgatcgggcattacccgccacagacctaatgcaaagccatatccgacaaggaaccctttactttcttgttccgtaaagatgtctgaaccagataatagtttatcaggttcaaaataacggccattagtaaattcaataaaagagtgattcgttatcgcgcgggtttgccctgacatagaattaaaagtacgaggaaaatatagtgatgaataccaatcctttacatcactaaaatcttcacgaagaaggattcggcagtgaaaccttttcagcatcatgcttatttcgattttattttcaatagcaaggttgatcaaatctgacggttcaacccccagaaatgatgcacctctggacaatctacaatatgaaaatggaatctttatttctttttctgccataacgctaccctcaacgcccctaattaacttgcgagccaggcgggtagggtttcccgcttttcggttggccgacctagactcgcaagaccagtttaatctctattcgctacagttaacagaaccacattttgatgattacccgcaagaagttctaagcgatcataccacttattcagcgcgtccagtttctccggcagatacagactacggttataaatcgccataacccctggcattgagtggcccagcaactgttcaacaacgtgcggagctatacccatattattcatatgcgttgcaagcgttcgccgtagatcatgcaatgtccagggttcagaatgcctcagttttttataaacactacggccccactggctaaccgcttcgctattcttcacaaccccaagaaggtagccggatgattttgtttcatcgtggagcatttcaataaatgaacgcatcgcctctggaactggacgcacaatcttttcaccgcctttactatgcgcttttggtactgtccacacccatgcctccatatcccattcggcccactctgacaatctggcctcctgggtgcggcaaccaaacaaagtggtgatcctgagcaagtttgtgtagtaaggcagaaaagtatcgccggacgatatagcagcccataatcccccaacctctttatctttcagtacccgatcttttttcgcctgctttttaccaacatcgggaatactcaaatcttcaagggcggtactgacggcgtaacggcgaacgcggcagaatttcagagcctgcttacacatctgaaatacataacccgcagcaactggcgttttctttttcatcctgtcaaagcagtcaagccagtatcgggtttcgcagtcagcgagcgccatttttccaatgtaagggtaaatatgcttgcgtagctccgctttatgccgctcaacgttcgcacggttttcttccgcatattcgcgtatccagtattcgatagcttcctgcaccgtgaccggtttaagcgtttcctgagtagttagcgccaactggtgctttgggtctttacctgaggccagccactggcgacatttatcacgcgaggaacgggcctctttgagactcatatcagggtatcgccccagagttagccgatgcagcttctgcccgtcgagccggtaagtaaacacccagctaataccaccagctttcgttaccttagcgctcaacccggcaccatcagcataaaactcaatcttactggccgggatgccatgtaatccctttaacttcctgtcgctcagtttgttaagttcgccagccatagaccaccacccagcccaaagtgtttatacaaatgtttatacagaattgcttgcataatagcataaacaacaaaaagcactggaacaatatacagtcacaatttcacataaccaattgattttaaataaaatacaaaacccactccaaagcatgaaaacagctaatctgacagtacggcatgaactgatactagtcagttgcttgcttgatataaaaggcgctcttcggcatggggaagcgccttttttattatctgcgccaacagaactcattactaattcaccagccgtagcgcaggccctcccgataaacgcgcagcacagaccaccgccattatattatccaccagcgcaggcgcctgctgataaagatcgaagcgttgcggatcgagcagccagtttttaatcagcccggaaaaagcactgtgtaaaacaattaatatcatctcaatgtttgtttcggctggcaatatattgttacgcacgcagcactgcaggatgccgccaatgagtgaataattaaaaccaatacgttggcgaatttcgtattccgaaagcatatcactggaaaactcacagcgctgataaagaatttgcatcagagcgcgctgtcgaggattcgcagcaatatagcgcaggcctgcaataaaccgctcgcgtaaagcatttagcggctcatgttcgtactctatggcctgactgggctgaatcaaatctctaagcggcggctgctgctgccacatttcattaaacagctccgtcttactggcaaaatgccagtacaccgcgccgcgagtcactcccgccgcatcggcgatatccgtcagggtggtgttggttactccgcgcagggcgaactgctggattgcggactcaatcaggagctgccgcgtgcgctgcgcctcttcttttgtttttcttgccatacaaggccccacttcccgataagcagataatataggatattcttaattagaattaatctagcatttgccatgaagtattatttagcaaaaatgcagacaagttaatcctgatgcgaaaagagaattaattattcaagtgaatatcaccggaaaatacattcactgaaataatgtctatttatcaacttttacaattgcgataaatcgcaatactacagtgaccatttttttgtttttgcgtgccttgctgattgcttaaaaataagtatctcttacatccaacggcgtttatttgtaggatggcaaactgctttttgattccctctttctttcacagattcgccgcctgattgggtacgtaatctataaggaaccgccatgacgactcacgccagagtgacacttttatccggtttaattatctcggccttattgctaaccggttgcgataattctgacaaccagcaaccccatgcgcaggcgccgcaggtgacggtccatgtcgtgaacagcgcgccgctatcagtcaccaccgaactgccgggccgaacctctgcttttcgcgtagcggaagtccgcccccaggtgagcggtatcattctgaagcgtaactttgttgaaggaagtgatgtcgaagcaggccagtcgctctatcagatcgatccggcgacctaccaggcggcgtggaacagcgccaaaggcgatgaggccaaagccgaagccgcggccgctatcgcccatttgacggtgaaacgctacgttccactgctgggtactaaatatatcagccagcaggaatacgatcaggcagtggccaccgcccgccaggccgatgccgatgtcatcgccaccaaagctgccgtagaaacggcccgtatcaacctggcctacaccaaagtaacctcccccattagcgggcgcatcggtaaatcgagcgtcaccgaaggggcgctggtcaccaacggccagtcggatgccctggctaccgtccagcagctcgatcccatctatgttgacgtgacggagtccagtaatgacttcatgcgccttaagcaggaaagcctgcagcgcggcggtgataccaaaagcgttgagctggtcatggagaacggccaggcctatccgctcaaaggttcactgcagttttctgacgtcactgttgatgaaagtacgggctcaattactctgcgcgctatcttccctaacccgcagcatgtcctgctgccagggatgttcgtccgcgcccgcatagacgaaggcgtcgatccgcaggctatcctggtaccgcagcaaggggtgacccgcacgccgcgtggtgatgcctccgtgatgctggtgaatgacaaaaaccaggttgaaacccgggaagtggtcgcgactcaggccgttggcgataagtggcttatcaccagtgggctgaagccgggcgataaagtgattgtcagcggcttacagaaagtccgtccaggcgtcactgtcaaagcggaagcggagcgtgcggcgccggccgtgcaataaggatacccagccatgtctaagttttttattcatcgaccggtcttcgcctgggtgctggctatcattatgatgattgccggcggcctggccatcctgcagctgccgatagctcagtacccgacaatcgcccctcctgcggtagcgatctccgccacctaccccggtgcagatgcccagaccgtacaggatacggtcactcaggttatcgagcagaatatgaacggcatcgacaatctgatgtatatgtcgtcgaccagcgactctgccggttcggtaaccattacgctcacctttaaatcgggtaccgatcccgatattgcccaggtacaggtgcaaaacaaactgcagctggccacgccgctgctgccccaggaagtacagcagcaggggattagcgtcgagaaatccagtagcagcttcctgttggtcgccggctttatctctgataacccgaccaccacccaggacgatatttctgactatgtcgcctccaatgtcaaagatcctattagccgcctcaacggcgtgggcgatgtgcagctgttcggcgcgcaatacgccatgcgcgtctggctggatggcaacctgctgaataaatacaacctgacgccggtggacgtcatcaatgcgctgcaggtccagaacgatcagatcgccgcgggtcagctcggcggcacgccagcgctgaaaggccagcagttgaacgcgtcaatcatcgctcagacgcggctcaaagatccgcaggagtttggcaaggtcacgctgcgggtcaatgccgatggctctgtcgtccatctgaaagacgtcgcccgcattgagctggggggagagaactataacgttgtcgccagaattaacggtaaacctgcctctggtctgggtattaagcttgcgaccggcgccaacgccctggataccgccaccgcgattaaagcgaagctggccgagctgcagccctacttccctcaggggatgaaggtggtctatccgtatgatacgacccctttcgtcaaaatctccattcacgaagtggtcaaaacgctttttgaagcaattattctcgtctttcttgtcatgtatctgttcctgcagaacatgcgcgcaacactcattccaaccattgccgtacccgtggtgctgttgggaaccttcgcggtattgtcgatgtttggctactccatcaacacgctgacaatgtttggcatggtgttggcgataggtctgctggtcgatgacgctatcgtagtagtggaaaacgtcgaacgtgtgatggttgaggagaagctctcgccaaaagaagcgacggaaaaatctatgtctcagatccagggagcgctggtgggtatcgccatggtgctctccgcagtatttgtcccgatggcctttttcggcggctcaaccggcgcgatttatcgtcagttttcaatcaccatcgtctccgccatggcgctctccgtgctggttgcgctggtactgacgccggcgctctgcgccacgttgttgaagccagcctcagctgaacaccatgagaaaaaaggatttttcggctggtttaacgcccgcttcgaccagagcgttaaccactataccaacagcgtcagcggtattttacgtggaactggccgttatctggtgatctacctgctgatcgtcgtggggatggccgtgctgttcatgcgcttgcacacgtcctttctgcccgacgaagaccagggcgtcttcctgaccatgatccagctgccgtccggtgctacccaggagcgcacgcagaaggtcctggatacggtgactgattactacctgcataacgagaaggccaacgttgaaagcgtctttaccgttaacggcttcagcttcagcggccagggacaaaactccggtatggcgtttgtcagcctgaagccctgggaagcgcgcagcggcgatgaaaacagcgtggagtccatcatcaagcgggccaccgtagcctttagccagatcaaagacgccatggttttcccgttcaacatgccagccattattgagctgggtaccgccaccggcttcgactttgaactgatcgaccagggcggactcggtcataccgctctgacccaggcgcgcaatcaactgctgggcatggtgaaacagcatccggatcagctggttcgggtacgccctaatgggctggaagatacccctcagttcaaactggatgtcgatcaggaaaaagcgcaggcgctgggcgtatcgctctccgatatcaatgaaacgatatcagccgcgctgggcggatactacgtcaatgactttattgaccgcggccgcgtgaaaaaagtgtacgttcaggctgatgcccacttccgtatgctgccgagcgacattaacaacatgtatgttcgtagcgccaacggcgaaatggtgccgttctccgcctttgtcacttcacgctggatatatggctcgccgcgcctggagcgctacaatgggttgccatctatggagatcctcggtgaagcttcgccaggcaaaagtaccggggaagccatggcgctgatggaaacgctggccagtaaactgccgagcggcatcggttatgactggaccgggatgtcttaccaggaacggctctccggcaaccaggcgcctgcgctctatgccatctcgctgatcgtcgtcttcctgtgtctggcggcgctgtatgagagctggtcgatccccttctcagtcatgttagtggttccgctgggggtcattggcgcgctgttagccgccacgctgcgtgggctgaataatgacgtttacttccaggtcggactcttgaccacgatcggtttgtcggccaagaatgcgatcctgatcgtcgagttcgccaaggatctgatggagaaagaagggaaagggatcattgaggccacgctggaggcatcgcggatgcgcctgcggcctattctgatgacctctctggcctttattctcggggtcatgccgctggtgattagccatggtgccggcagcggggcgcagaatgcggttggcaccggcgtgatgggcgggatgctgaccgcgacgctgctggcgatcttctttgttccggtcttctttgtggtcgtcagacgacgttttacccggcacgctgaataacgcggcctggttttaaaggcgccccctgcgggcgcttttttttcgcctggcatattagcaacccgctcagcttcccgctatctgacaacctctatcgcatgcggcagcgcggggagacgatctttctctccatcttttctgcatattcccctgcttatcttcacgatatttacgtggctcatatattgagatgatttcggcctccggcccggacaatccgcggtgataaaataagccattccgttctgcactggctctcagtacaaccctgcggattatccagaggtaatatcatgaaaaagtatttaatcgtggcgctgctggcctctctactggcaggctgtgcccatgactctccctgcgtaccggtttatgactcgcaaggccgcttagtccataccaatacctgtatgaaaggcacaacagaagacaactgggaaaccgcaggcgcaatcgccgggggtgcggccgcggtagccggcctcacgttagggatcgttgctctgacccgctaattcacccccgaccagcagatactggggctagcgtcgaacctgtatctgctcttctgcgcatcatccacatgacaaccgggcaaataaactctctgtcccttgctgcattacgagcaaatcgactttgacgggtttccccctggtggcaggactgtttatcaacagataacagataacacaaaagcagaaggcccagtctttcgactgggccttctgctttatttgatgcctggcgattccctactctcacatggggagaccccacactaccatcggcgctacgacgtttcacttctgagttcggcatggggtcaggtgggaccgccgcgctattgtcgccaggcaaattctttacaacgtgccgaactttaacctaaaaagtggtgctgatacccagagtcgaactggggacctcacccttaccaagggtgcgctctaccaactgagccatatcagcacgctaaatttgatgcctggcagttccctactctcacatggggagaccccacactaccatcggcgctacggcgtttcacttctgagttcggcatggggtcaggtgggaccaccgcgctagtgccgccaggcaaattctgttttatcaacacgtttcaccaacgtatcgattaatctgaatcagagctgaaaattctctcaaatccgccaaaacatcttcggcgttgtaaggttaagcctcacggttcattagtaccggttagctcaacgcatcgctgcgcttacacacccggcctatcaacgtcatcgtctttaacgttccttcaggagacttatagtctcagggagaactcatctcggggcaagtttcgtgcttagatgctttcagcacttatctcttccgcatttagctaccgggcagtgccattggcatgacaacccgaacaccagtgatgcgtccactccggtcctctcgtactaggagcagcccccctcaattctccagcgcccacggcagatagggaccgaactgtctcacgacgttctaaacccagctcgcgtaccactttaaatggcgaacagccatacccttgggacctacttcagccccaggatgtgatgagccgacatcgaggtgccaaacaccgccgtcgatatgaactcttgggcggtatcagcctgttatccccggagtaccttttatccgttgagcgatggcccttccattcagaaccaccggatcactatgacctgctttcgcacctgctcgcgccgtcacgctcgcagtcaagctagcttatgccattgcactaacctcctgatgtccgaccaggattagctaaccttcgtgctcctccgttacgctttgggaggagaccgccccagtcaaactacccaccagacactgtccgcaaccccggtcaggggccaacgttagaacatcaaacattaaagggtggtatttcaaggttggctccacgcagactggcgtccacgcttcaaagcctcccacctatcctacacatcaaggctcaatgttcagtgtcaagctatagtaaaggttcacggggtctttccgtcttgccgcgggtacactgcatcttcacagcgagttcaatttcactgagtctcgggtggagacagcctggccatcattacgccattcgtgcaggtcggaacttacccgacaaggaatttcgctaccttaggaccgttatagttacggccgccgtttaccggggcttcgatcaagagcttctccttacggataaccccatcaattaaccttccggcaccgggcaggcgtcacaccgtatacgtccactttcgtgtttgcacagtgctgtgtttttaataaacagttgcagccagctggtatcttcgactggtctcagctccatccgcagggacttcacctacacaccagcgtgccttctcccgaagttacggcaccattttgcctagttccttcacccgagttctctcaagcgccttggtattctctacctgaccacctgtgtcggtttggggtacgatttgatgttacctgatgcttagaggcttttcctggaagcagggcatttgttacttcagcaccgtagtgcctcgtcatcacacctcagccttgattatccggatttgcctggataaccagcctacatgcttaaaccgggacaaccgtcgcccggctaacatagccttctccgtccccccttcgcagtaacaccaagtacaggaatattaacctgtttcccatcgactacgcctttcggcctcgccttaggggtcgactcaccctgccccgattaacgttggacaggaacccttggtcttccggcgagcgggcttttcacccgctttatcgttacttatgtcagcattcgcacttctgatacctccagcatgcctcacagcacaccttcgcaggcttacagaacgctcccctacccaacaacacatagtgtcgctgccgcagcttcggtgcatggtttagccccgttacatcttccgcgcaggccgactcgaccagtgagctattacgctttctttaaatgatggctgcttctaagccaacatcctggctgtctgtgccttcccacatcgtttcccacttaaccatgactttgggaccttagctggcggtctgggttgtttccctcttcacgacggacgttagcacccgccgtgtgtctcccgtgataacattcttcggtattcgtagtttgcatcgggttggtaagtcgggatgaccccctagccgaaacagtgctctacccccgaagatgagttcacgaggcgctacctaaatagctttcggggagaaccagctatctcccggtttgattggcctttcacccccagccacaagtcatccgctaatttttcaacattagtcggttcggtcctccagttagtgttacccaaccttcaacctgcccatggctagatcaccgggtttcgggtctataccctgcaacttaacgcccagttaagactcggtttccctgcggctcccctatacggttaaccttgctacagaatataagtcgctgacccattatacaaaaggtacgcagtcacacccgaaggtgctcccactgcttgtacgtacacggtttcaggttctttttcactcccctcgccggggttcttttcgcctttccctcacggtactggttcactatcggtcagtcaggagtatttagccttggaggatggtccccccatattcagacaggataccacgtgtcccgccctactcttcgagttcacaacctgtgcattttggtgtacgggactatcaccctgtaccgtcggactttccagaccgttccactaacacacaagctgattcagactctgggctgctccccgttcgctcgccgctactgggggaatctcggttgatttcttttcctcggggtacttagatgtttcagttcccccggttcgcctcgttaacctatgtattcagttaacgatagtgcaacgaattgcactgggtttccccattcggacatcgccggttataacggttcatatcaccttaccgacgcttttcgcagattagcacgtccttcatcgcctctgactgccagggcatccaccgtgtacgcttagtcgcttaacctcacaacccgaagatgtttcacttctgattgcgaaaatttgagagactcgaacacacattaactgtgtgtcgtttcaattttcagcttgatccagatttttaaagagcaaaatttcacaatgcacttcgcagtacattttgaaatttattatttatcaaacaatctgtgtgagcactacaaaggcaggttctttaaggtaaggaggtgatccaaccgcaggttcccctacggttaccttgttacgacttcaccccagtcatgaatcacaaagtggtaagcgccctcccgaaggttaagctacctacttcttttgcaacccactcccatggtgtgacgggcggtgtgtacaaggcccgggaacgtattcaccgtagcattctgatctacgattactagcgattccgacttcatggagtcgagttgcagactccaatccggactacgacatactttatgaggtccgcttgctctcgcgaggtcgcttctctttgtatatgccattgtagcacgtgtgtagccctggtcgtaagggccatgatgacttgacgtcatccccaccttcctccagtttatcactggcagtctcctttgagttcccggccggaccgctggcaacaaaggataagggttgcgctcgttgcgggacttaacccaacatttcacaacacgagctgacgacagccatgcagcacctgtctcacagttcccgaaggcaccaatccatctctggaaagttctgtggatgtcaagaccaggtaaggttcttcgcgttgcatcgaattaaaccacatgctccaccgcttgtgcgggcccccgtcaattcatttgagttttaaccttgcggccgtactccccaggcggtcgatttaacgcgttagctccggaagccacgcctcaagggcacaacctccaaatcgacatcgtttacggcgtggactaccagggtatctaatcctgtttgctccccacgctttcgcacctgagcgtcagtctttgtccagggggccgccttcgccaccggtattcctccagatctctacgcatttcaccgctacacctggaattctacccccctctacaagactctagcctgccagtttcgaatgcagttcccaggttgagcccggggatttcacatccgacttgacagaccgcctgcgtgcgctttacgcccagtaattccgattaacgcttgcaccctccgtattaccgcggctgctggcacggagttagccggtgcttcttctgcgggtaacgtcaatcgccaaggttattaaccttaacgccttcctccccgctgaaagtgctttacaacccgaaggccttcttcacacacgcggcatggctgcatcaggcttgcgcccattgtgcaatattccccactgctgcctcccgtaggagtctggaccgtgtctcagttccagtgtggctggtcatcctctcagaccagctagggatcgtcgcctaggtgagccgttaccccacctactagctaatcccatctgggcacatctgatggcatgaggcccgaaggtcccccactttggtcttgcgacattatgcggtattagctaccgtttccagtagttatccccctccatcaggcagtttcccagacattactcacccgtccgccgctcgtcacccgagagcaagctctctgtgctaccgctcgacttgcatgtgttaggcctgccgccagcgttcaatctgagccatgatcaaactcttcaatttaagtttgatgctcaaagaattaaacttcgtaatgaattacgtgttcactcttgagacttggtattcatttttcgtccgaggacgttaagaatccatgtcactttgagtgcccacacagattgtctgataaattgttaaagagcagttgcgacgcgctttagcgctctgtcgcgaggtggcgtatattacgctttcctctttcagagtcaacccgtttttcaggatttttctctgcaaccgaaccggctgtttgtgtgaagtgattcacatccgccgtgtcagtgggagcgcattatagggatcccatttttttgcacaagccttttttcgatctttttttctgaatggtgatttttcacccttttcgccgtgtaattgcacgatttgctcaattttcaccgttttcaggggttgcacagggagataaaagccaccaaagtcttcttatgctcccgtatttttgaggtctatatgtctgctcagctgcgcccctacaaagcatttttcccacaaatcggtcttcgcgtcatgattgacgcatccagcgtcgtcatcggcgatgtcagaattgccgatgacgtcagcgtctggcctctggtggccattcgcggcgacgtcaactatgtatcgataggtcaacgcagcaatattcaggacggtagcgttctccatgtgacccataagtcctcttataagccggagggaaatccgctgatcattggtgaggatgtaactgttggtcataaagtgatgctgcacggctgcactatcggcaaccgcgtactggttggcatgggttcgatcttattagatggtgtcgtcgttggcgacgacgtcatgataggtgcgggaagtctggtaccgcagaacaaacagctggaaagcggctacctttactttggcaatccggtcaaacagatccgccccctgacagaggcggaacgggaaggactcaagtattcagcaaataactatgtgaaatggaaaaatgagtacctggatcaggataaccagatccagccctgagcatcttcctgaccatcgcggatcaatgcttctgcctcttcctctagatcccaacgatgttcctggaaggcggccagccactgcgctggcccctctgcaccgaaacgctgctgcaggatttgccctgaaattgcgcaggttaattgcatcccattcaccagcgcgggaaaaaccacgccctgccgttcggcatcccatgattcccggtcaggaaactgaatcgcctgattcatgcattcagttcctgctgcagcgtttcaatgaccggagcgatagccggcagaacgccgtgccatagcagaacagcatgggcggcttgcgccaccagcattcccagcccatcggcacagtgaactgcgccatattgctggcaccagtgaagaaacggtgtcggccctttctggtaaaacatgtcatagcaatatacgtcagcgttgacaatagatgccgggatagctggtacatcaccgtctattccactggacgtcgcattgacgatcagatcgaatgtttccccggataaggtatccatctcccttgcgctaacgctcccggtatgggcgaagagagtggctaactcacgggcacgagaataggtgcgattcacgatcgtgacggcgcatcccagcgacagaagcggcaaaagaacaccgcgagatgccccaccagcaccaacaagcaggatccgttggcgtggcttaatgaatcccaggcgttccagatcgctcagaagaccaataccgtcggtgttgtcccccagtaaacggccatcttccaggcgtttcagggtgtttactgctcccgccagcgctgcgcgttctgtcagttcgtcggcacgcgcaaaggcttcctctttaaaaggaacggtgacgttggccccctttcctccttctgcaaagaactgattcagagaagagacaaaatcgtccagcggcgccagtacacgtccataaggatgagtaattcctaactggcgggcaaacagctgatgaatagcaggcgacttgctgtgcgcgatcggattaccaaaaacggcataggtttccatggttcacccctggcggaacagttcacccgtcagggcatcacggatttcagatgggttttgccggccgcccgtggcgccatccaccaccgggaagctgtcgccaaactgagcatggacctctgcggtagtacggcacggtggttgcccggtgagattggcgctggtcgaaaccagtggttttccgtaggcttcgcacaattcgattaccagcggatggttagtcacgcgtacggccagtgaatcaaaacgtccagtcagccagcgcggcgtttcaggacgcgccgggaatacaaacgtcaccggtcccggccagcaagagaagatggcttcccgctgtgagtcacttaaccgtgaatcatcaatatagggcttcagttgctcaaagctggcggcgataaggatcaatcctttctcaacaggacgctgcttcagctccagcaggcgcataacggccgtttcgctgtcagggtcgcagccgacgccaaacacggcttcggtgggataggcgatgacatgttcatttttcaggaccgccacggcatgggcgacggcttctgagggcaggttattgttcactgatttattccgccgggatcggctttccacattgtttactggcacagaagcgtctgagcccctgcgccgtcttcttttctattaacagcgggtaatggcattcagggcattcgcccgccaccggtttaaaattgataacgaactggcaatcaggatagcgatcgcaggagtgaaaggttttaccgaaacgggaacgacgctggaccagatggccttgtccgcactgcgggcaagcgatagccgtctcatcgggtttatcaatcagctcggtatgttcacattccggatagcggctacagccaatgaacatcccaaaacgcccctggcgtaacaccataaccgcaccgcacgatgggcactcttgcccctccagcaccttaacgatatgcccgtccgcctggcttttcaggggacgaatatagtcacagtccggataatgcgaacagccgagaaacgggccatgtttcccggaacggatcaccagttcggccccgcactgcgggcagggctcatttttacgcaccgaaaacagtgctgatttggtcataacaactcgatgttgctgcaaaagattaatgcagcataccttcatttacttcgaagagtaattcttccatttgctgataggcgttttcacagcccgggatattgaacagtaccatcaggatgacccatttcaggtcttccagctcaaattctgccgtatccagcgccagtacgcgctctatcaccatttctcgcgtttcgaggttcaacacctgaatctgctcgaggaagagtaaaaacccccggcaactggcatccagacgctggcactcctcttcggtatatacccgaagagagagcgggtcggaagcgagctgcatgggttcaacgagaccctcctgataatcagccagtttctcgagccacattaacgcgttatagatgtcttcccgctcaaaacccgcatcggtaagatcccgcgtcagtttgtcctgatccacgcgcatttctgcttcgctatggatgtaagtttcaaacaaatacatgagtacgtcgaacatggcttgccctccttaatcggacatagccgccgggtacagctgcgatccagcctgctaactccagttcaagtagctgagctacggttactggcacagattggccggcacgttcagcgacaacgtcaacaggtgttacctcatctcctacgttagccaggagctccggaaatggcaatgctacagacggctgatcgacgcaaatatttatcgaatcagacgtatcagtcagccaggccagctcgttatgccagtattccacaatatcctctggcgaggtcactggcaccgcgccttgcttaattaaccagtgcgggccttccgatcccggattgcctatcgggccaggcagggcgaacacatcccttccctgctccagggcgcagcggacggtgaccagcgatccgcttcgcaacgccgcctcaatcaccagcacgcccaggcttaagccgctgataatccggttgcgcctggggaaatgtgcgggaagcggcggcgtaatgagtggaaattcagataccagcgtaccgccattgtcgatgatctgccgggcgagggttgcatggcgccgcggataaacctgactcagcccattgcccagtaccgcgatagttttaccctccgccgccagcgcgccgcggtgcgcgaccccgtcaatgcctaacgccagcccactggtgatggtaatccctttctgcgccagcgtttcgctgaacagtttcccccagcgggcgccataccaggagtgcgagcgactgccaataacggcaagctgcgcgctgtgaagcagggcgaggccgccgctgaccagcaacgcgccgggataatcagcgatagcctttaaccgcaatggatagcgcggatcgtcaccccgtaacagatgatgatccggttgtcccagccagcgccgcgtctcgtcaagctcatgctcgtcaagccggaaaaataactttgcctgcgccgcggtcatcccgacggcatgcagcgcttcacgatcaacgctggcggctgcgcataagcgctgagcgatctctaccatcctgtcgccatacaagctactgaccttcatcagccgcagccaaatctcgtcgggcgtcatccttaccccctgccataagcggtattgacaatctttgcgattggacagtgagactgtcaattgcagggggttttgtctagaatagagctaataatcttatcaactcctgaatacgactctggaactttatggcagttttgcaagtgttacatattccggacgagcgccttcgcaaagtcgccgagccggtcaaagaagtgaatgcggaaattcagcgtatcgtcgatgatatgttcgacaccatgtacgccgaggaaggcatcggtctggccgcaacccaggtcgatatccatcagcgcattatcgttattgatgtgtcggaaaatcgtgaagagcagctggtattaattaatccggaaatgctggagaaagatggcgaaaccggtattgaagaaggctgcttgtctattcctgaacagcgcgccctggtcccgcgtgcggaaaaagtgaagatccgggcactggagcgcgatggtaagccgtttgaactggaggccgatggcctgctggctatctgtatccagcatgagatggatcacctggtcggcaaactgtttattgactatctgtcaccactcaaacaacagcgcattcgtcagaaggtagagaaactggatcgtttacgttcccgtgcctgataacaaggaataccgtgtcacaatcactacgtatcattttcgccggcacccctgattttgcagcgcgtcatcttgatgcgctgctgtcgtctgaacatcaggttgttggcgtattcactcagcctgatcgccctgctggtcgcggcaaaaaattgatgccaagcccggtaaaagtgctggcagaagcccataacttacctgtgttccagccatcctccctgcgtccgcaggataaccagcggttagtcgccgatctcggcgccgatattatggtggtagtggcgtacggtctgattctgcctaaagcggtgctggagatgccccgtctgggctgtatcaacgttcacggctcgctgctaccgcgctggcgtggcgcagcgccaattcagcgttcactgtgggcgggggatagcgaaactggcgtaaccatcatgcagatggacgtcggccttgatacgggggatatgctgtataagctttcctgccccattaccgcagaggataccagcggcagcctgtacgataagctggccgagctcggcccgcaggggctgctggcaacgttagcccagctggtcaacggcaccgcacggcctgaagtacaagatgaatcgctggtgtgccatgccgaaaagctgagtaaagaagaggctcgtatcgattggtcgctttccgctgcgcagttggaacgctgcatccgcgcgtttaatccgtggccaatgagctggctggaaattgacggacaaccggtaaaagtgtggcgggcatcggtcatcgccgaagccgctcacgccgaaccgggtactatcgtggcagcaaccaaacagggtattcaggtcgccacgggggatgggatcctcagcctggagtcgctacagcctgcgggtaaaaaagcgatgagcgcccaggacttactcaattcccgccgggagtggtttatccctggcacccgtctcgcctgacggtcgtctcttctgaagcccgggttcgccgggcatttttatttttgcgcttatgaaaaagaatataaatttacgcagcctggccgcccaggctatcgaacaagttgttgaaaaagggcagtctttaagcaacgtactgccccctctacagcagaaagtcagcgataaagataaagcgctactgcaggagttgtgctttggtgtactacgtactctaagccagctggagtggctcatcagcaagctaatggcgcgtccgatgaccggcaaacagcgcaccgtgcactttctgatcatggttggtctctatcagttactctacacccgcattcccccgcatgccgcgctggcggaaacggtagaaggcgcggtggccattaaacgcccgcagcttaaagggctaatcaacggcgtgctacgccagttccagcgccagcaggaagcgttgttagccgaatttgctgagcatgaaaaccgctatcttcatcccaaatggctgctgaaacgcctgcagcaggcctggccggagcagtggcaggagatcgtcgaggcgaacaaccagcgcccgccgatgtggctgcgcgttaaccgcaaccatcattcccgggatgagtggcttgccctgcttaacgaggccggtttagagggctttacccaccctgattatccggacgccgtacgcctggccacccctgccccggtccacgcgttaccaggatttgatgaaggttgggtaaccgttcaggacgcctcggcccagggctgtatgcgctacctgcagccgaaaaatggcgaacgcatcctcgatctctgcgcggcaccgggcgggaaaacgacgcatattctggaagtcgccccccagtctcaggtcatggcggtggatattgatgaacagcgtctgtcccgcgtctatgacaacctgaaacggctgggcatgaaagccgaagtcaagcagggcgatggccgcttccctgagcagtggtgtggcaatgagcagttcgatcgtattctgctggatgccccctgctccgcaaccggcgttattcgccgccatccggatatcaaatggctgcgccgggatcgggatatcgccgagttagcccagctgcaggccgagatcctcaatgccacctgggcgcacctgaagccaggcggcacgctggtttacgcaacctgttctattctgccggaagagaacggtcagcaaattgccgccttcctcgcgcgaactccggatgcagaacttcacgcaaccggcacgccggcgagccccgggcagcaaaatctgccgggcgtggaagaaggtgatggcttcttttacgctaagctaatcaaacgtcggaactaatgggtcactgcagatgaagattattattctgggcgccggccaggtcggcggcacgctggcggaaaacctcgtcggcgagaacaatgatattacgctggttgataccaatggcgaccgtctgcgcagcctgcaggataagttcgacctgcgtgtcgtccaggggcatggctctcaccctcgcgtactgcgtgaggcgggggccgatgatgccgatatgctggtagcggtcactagttcggacgaaaccaacatggtggcctgccaggtcgcttattcattgttcaatacgccaaaccgcatagcgcgtattcgtgcgcctgattacgttcgtgatgcggaaaagctcttcaactctgaagcggtacccatcgatcacttaatcgctccggaacaactggtcatcgacaacatccaccgtctgatcgaatatcccggcgcgctgcaggtcgtgaacttcgcagaaggaaaagtcagtctcgcggtagtaaaagcctattatggtggcccgctggtggggaatgccttatccactatgcgggagcatatgccgcatatcgatacgcgcgtggccgccattttccgccacgatcgccccatccgcccgcagggttcgacgattgtcgaggccggagatgaagtcttctttattgccgcctcgcagcatattcgcgcggtcatgagcgaactgcagcgactggaaaagccgtataagcgtattatgctggtcggcgggggcaatattggcgcgggtctggcccataagctggaaaaagattacagcgttaagcttatcgaacgtaatcagcagcgagccgctgagctggcggaaaagctgcagcatactatcgtcttctacggggatgcatcggaccaggagctgttggctgaagagcatattgaccaggtggacctgtttattgccgtcactaacgacgacgaagccaatattatgtcggctatgttggccaagcgaatgggcgcgaaaaaagtgatggtgctaatccagcgcagagcctacgtggatctggtccagggtagcgtcatcgatattgcgatttcgcctcagcaggccacaatttccgcactcctcagtcatgtccgtaaagctgatattgtcggcgtctcctccttgcgccgcggcgttgcagaagcgatcgaggcagtcgcgcacggcgatgagagcacctcccgggtagtcgggcgttcgatcgatgagatcaaacttccaccgggcacgatcatcggcgccgtcgtgcggggcaatgacgtgatgatcgccaataataatctacggatcgagcagggcgaccatgtgatcatgtttttgaccgataagaagtttatttccgatgtcgaaaggctgttccagccaagtcctttcttcctgtaattcccagggcgccgaacaggcgcctttttattatcccttattattcaaaggttaatattttgcagtaactatctgctgggaatggcaaatgaaaatacatttgttaaacttacaacgtcagctggcacaaggagaataaaatgagttttttaaaagagtttcgcgaattcgcgatgcgcgggaacgttgtcgatttggcagtgggtgtgatcatcggtgcagcattcggtaaaattgtttcatcactggtcgcggatattattatgccgccactcggcctgttgattggcgggatcgattttaaacagtttgccgtcacgctacgtgatgcccaaggcgatgtcccggctgtggtgatgcattatggggtattcattcaaaacgttttcgatttcatcatcgtcgcgtttgccatcttcatggcgattaaattgatgaataagttaaatcgtaagaaagaagaggctccggcggcaccgccagctccctctaaagaagaagttctgctgagcgaaattcgcgatctgctgaaagaacaaaacaaccgttcttaatcagcagagaaagcagaaggccagtggtaaaaaagcgattcgcttgcttgccactggcctcccgatcaatccttcctgcatgtttatctttacgttgatagcttcctttccctttcttgtttttctctacgcgctgcctgaataacggatcgtggagaagtgcctcaatggcgttatctttaatttgtcctttagtatgctgatagcgactcatagttactccggtatatgtataaactcggcgcgagtgtagatccgcgcgtttaaaaaatcaacgtccgccattgccgttgctggccccttgttcaagggcctcaaggatagaacagtaaacgctgctgtgggcagtgccgcaacaggcatcgttgagccgctgcagagagcggcgcatcgtctgtagctctttaatccgcgcctcaacttcacttaatcgcgcctgaacgatccctttcgactcctgacaggtatgatgctccggatcgatgcggatcgacaataattcgcggatcgcttccaggctgaaacccagttgtcgggcataacgaataaagcgcagccgttgaagatcgttatccgagtacagacgaaatcctccctcggtgcgtatgtcatgatccatcatctgctgcttttcatagtagcggatggtatcaggcgtcacgtcggccagttttgccagttcaccaatacgatacatatttactcctgatttattttttgcagcaacgcatcggcgtactcaccgcgtaaaaagtcggtgttcagacctgcctgacgtaacttcagctcgagcagggcaaggcgtttgctaagttcggcatgacgcggatcgtcctgacggacgccgttcagtaagtctgccagagccaacgcttctttgcgttgctccagttccggaggaagacatcctgcatttttcagaaggcgatagcctgcccgcaactccgccggcacatgtgaatcgtcatcgagagtcagcggttctccgctgccgggtaaattatcgaactcacctttggtttgggcatcgaggatatgacgttccgcccactgatccagcaaccacattctacggctccaggggatgaacaaaaagagtacagatagtgtagtgaaatggggatggggtagatataaaaaaacccgccagggcgggtttttttacgttactacagattactctgcagcagcttctgctttcggctcagcacgatcaaccagctcgatgtatgccatcggcgcgttgtcgcctgcacggaagccacacttcagaatgcgagtgtaaccaccggcgcggctcgcgaaacgcgggcccagctcgttaaacagttttgccacgatctcgttatcacgagtgcgggcgaatgccagacgacgattagcaacgctatcagtcttggcaagagtaatcagcggctcaactacgcgacgcagttctttcgctttcggcagggtcgtcttgatgatttcatgacgaaccagcgaacctgccatgttacggaacatagcctggcgatggctgctgttgcggttcagttgacgaccactcttacgatggcgcatgaccttatccttctcagtaaaaccttaacctgtgatccggttactcgtcagcaatgcttgctggtggccagttttccaggcgcatgcccagagacagtccacgggaagccagcacgtctttaatctcagtaagagattttttacccaggttcggcgttttcagcaactcaacctcggtacgctgtaccagatcaccgatatagtggatagcttctgccttgaggcagttagcagagcggacagtcaattccagatcgtcaacagggcgcagcaggatcggatcgaattctggtttctcttctttcacttctggctgacgtacatcacgtaggtcaacaaaagcttccagttgttcagccaggatggttgccgcacgacgaatcgcctcttcaggatcgattgtgccgttggtttccatttcgatgaccagcttgtccaggtcggtacgctgttctacacgcgcagcttcaacattgtaggcaatacgctctacagggctgtagcaggcgtcgaccagcagacggccgattgggcgctcatcttcttccgaatgaattcgggcagaagccggcacataaccgcgaccgcgctgaactttgatacgcatgctaatagcagcgttctcatcagtcaggtggcaaatcacgtgctgcggcttgacgatttcgacatcaccgtcgtgggtaatgtcggctgcggtcacagggccaatgccagatttattcaaagtaaggatgacttcatctttaccctgaactctcaccgccagccctttcaggttgagcaggatttcaaggatgtcttcctgaacgccttctttggtgctgtactcgtgcagtacaccatcaatctcaacctcggtcaccgcgcaacccggcatcgatgagagcagaatacggcgcagtgcgttacccagagtatggccgaagccacgctctaaaggctcaagggtcaccttggcgtgcgtcgaactcacttgctcgatatcgaccaggcgcggttttagaaactctgtcacagaaccctgcattgtgtcctctctttggtactaagctttacttggagtaaagctcgacgatcaggtgttcgttaatgtccgcagacagatcagaacgctccggctgacgcttgaacgtaccttccatcttgccagcatcaacttccagccaggttggcttttcacgctgctcagccagctccagagcggctttcacgcgagattgctttttcgctttctcacgaatgctgacaacgtcattcgctttaacctgataagaagcgatgttaacaacacgaccgtttaccataatcgctttgtggctaaccagctggcgtgcttcagcacgagtggcgccgaagcccatacggtatacaacgttgtccagacgaccttccagcagagccaacaggttttcaccggtgttgcctttcagacgtgctgcttctttatagtagttacggaactgacgctccagcacaccgtacatacggcgaactttttgcttttcacgcaactgcacaccatagtcagacagacgcggcttacgcgcaccgtgctggccaggagcttgttcaattttacacttggtatcgatcgcgcgaacgccagacttaaggaataagtcggtgccctcacgacggctcagcttgagcttaggacccaaatatcttgccattttctttctccaactaacctggaaaacgcagcgttatacgcgacgttttttcggcggacgacaaccgttatgagggatcggagtcacatcagtaatattagtgatgcggaaaccagcggcgttcagtgcacgaatggtagattcgcgacccggacccggacctttgaccataacttccagattcttgatgccgtattcttttacggcttctgcgcaacgctctgctgcaacctgagctgcgaacggagtggatttgcgagaaccacggaaaccggaaccaccggctgttgcccaacccagtgcgttaccctgacgatcagtgatggtaacgatggtgttgttaaaagaagcatggatatgagccacgccgtcagagacttgttttcttacacgcttacgtgcacgaattggtgcctttgccattattcaatcaccccgattatttcttgatcggtttacgcggacccttacgggtacgtgcgttggtcttggtacgctgaccgcgaaccgggagaccacgacgatgacgcaaaccacggtagcaaccaaggtccatcagacgcttgatgctcagggtgatttcacggcgcagatcaccttcaacgacaaatttacctactgcttcacgcagaatatcaatttgttcttcagacagctcactgatcttaacattttcagcgatgcccgtttcagcgcagatggctttagaacgggttttgccgataccgaaaatagcggttaaagcgataacggtatgtttgtgatcaggaatgttaatgcctgctatacgggccactatgcactcctactatttaatatgtacgcaccatgctgaaaagcccgttttcaggatactcaaatggaaacgtacagacatacaaaagattggctggctaatctagccagctcaatccaactttgcaagaaaaatatgcgaaaaaatcagccttggcgctgtttatgcttcggctcggcactgcaaatcacacggatgacaccatcacgcttaacgattttgcagttacggcataatttcttgacggaagcacgaactttcatttttactctccgtaacttctcgggcgaccagttttaacggccgtagcctttcaggttcgccttcttcaatgcagactcatactgactggacatcatcagagtttgcacttgagccataaagtccataatcacgacaacaacgataagcagcgaggtcccaccgaagtagaacggcactttcatcgcgtcacgcatgaactccgggatcaggcagataaaagtaatgtacaacgcaccaaccagagtcaggcgagtcatcactttatcgatatacttcgccgtttgctctcccggacgaattcctggtacaaatgcaccggacttcttcaggttatctgctgtttcacgcgggttgaaaaccaacgccgtgtagaagaaacagaagaagatgattgcagacgcatagagtaacacataaagcggttgcccaggctgcaaatacagcgaaattgttgtcagccagttccaaccagtaccacccccgaaccatgacgtgatggttgccgggaacagtataatactggaagcgaagattgccgggattacccccgccatattcactttcagcggtaaatgtgtgctctgtgcagcatagacacgacgaccctgttgacgtttcgcgtagtttaccacaatgcggcgttgaccacgctcaacgaatacaacaaagaaggtcactgcaaatactaatactgcaaccaacagcaacaggaggaagtgcaggtcgccttgacgcgcttgctcgatagtatgggcgatggccggcgggagtcccgcaacgataccggcgaagataatgatcgagataccgttaccgataccacgttcagtgatctgttcgccgagccacatcaggaacatagtccctgtgaccagactgacaacagcggtgaaatagaatgcaaagcctggattaatcaccaggccttgcataccaggcatattcggcagaccggtagcaataccgatcgactggaatatcgccagcaccagagtaccgtagcgggtgtactggctgatcttacgacgaccagactccccttctttcttcagttccgccagcggttgataaaccaccgtcagcagctgcacgatgatcgatgccgaaatgtacggcataatccccagcgcaaagatagaagcacggctgagagcaccaccagagaacatgttgaacatttcaatgatggtgcctcgctgttgctcaagcagtttggcaagtacagcggcatcaataccagggatcggaataaaagagccaatacggaacactatcagcgcaccgaccacaaacagaagtctgcgtttcagttcgccaaggccacctttggcactttgaaaatctaatcccggttgtttagccatctgctacttattcctcaattttaccgccagcagcttcgatagcagcacgagcacctttagtcacacgcaggccacgaacagttaccggacgagttacctcaccagacaggatcactttcgcgaactcgatctggacaccgataatgttagccgctttcagcgcgttcaggtctactacatcgccttctacgtgagccagatcggagagacggatctctgcggtgatcatcgctttacgagaagtgaagccgaatttcggcagacgacggtacagaggcatctgaccaccctcgaaaccgcgacgtacgccaccgccagaacgagatttctgacctttgtgaccacgaccaccggttttaccgaggccagaaccgataccacgacccaggcgtttacccgcctttttggagccttcggccggagacagagtatttaaacgcatctcttactcctcaactttaaccatgaaggaaaccgcgttgaccataccacgaacagcaggagtatcctcgcgctctacggtgtgaccaatacgacgcagacccaggccaagcagcgttgccttgtgtttcggcagacgaccgattgcactgcgggtttgagtaattttaatagtctttgccatggtttatttccccagaatttcttcaacggatttaccacgcttggcagcgaccatatccggggacttcatgttttccagaccgtcgatagttgcacgaaccacgttaatcgggttagtggaaccatacgctttagccagaacgttacgaaccccagcgacttccagaacggcgcgcattgcaccaccggcgatgataccggtaccttcggaagccggctgcatgaatacacgagaacccgtgtgagtacccttaaccgggtgctgcagggtgccgtggttcagcgcgacgttaatcatattgcgacgggctttttccatcgctttctggatcgctgctggaacttcacgcgctttaccgtaaccaaaaccaacgcgaccgttaccatcgcctactacagtcagagctgtgaaggagaaaatacgaccacctttaacggttttagatacgcggtttaccgcgatcagcttttcctgcagttcgccagcttgtttttcgatgtgagccatcttacacctctaccttagaactgaaggccagcttcacgggcagcatctgccagtgcctggacacgaccatgatattggaacccggaacggtcaaaggaaacatctttgatgcctttttccagagcgcgttcagcgacagctttacccacagctgctgcagcgtctttgttaccggtgtacttcagttgttcagcgatagctttttctacagtagaagcagctaccagaacttcagaaccattcggtgcaattacctgtgcgtaaatgtgacgcggggtacgatgtaccaccaggcgagttgcgcccagctcctggagcttgcggcgtgcgcgggtcgcacgacggatacgagcagatttcttatccatagtgttaccttacttcttcttagcctctttggtacgcacgacttcgtcggcgtaacgaacacccttgcctttgtaaggctcaggacgacggtaggcgcgcagatctgctgcaacctggccgatcacctgcttatcagcgcctttcagcacgatttcagtctgagtcggacattctgcagtgatacccgcaggcagctgatgatcaaccgggtgagagaaacctaaagccaggtttactacattccctttgaccgctgcacgataacctacaccaaccagctgcagcttcttagtgaagccttcggtaacaccgataaccattgagttcagcagggcacgcgcggtaccagcctgagcccaaccgtctgcgtaaccatcacgcggaccgaaggtcagtgcattatctgcatgtttaacttcaacagcatcgttgagagtacgagtcagctcgccgtttttacctttgatcgtaataacctgaccgttgatttttacatcaacgccggcaggaacaacgaccggtgctttagcaacacgagacattttttcctccgattaggctacgtagcagataatttcgccaccaagaccagcctggcgcgctgcacgatcagtcataacacctttagaggtagaaacaactgcgatacccagaccggccataactttcggcagctcatcttttttcttatagatgcgcagacctgggcggctgacacgctgaatgctttctacaacagctttgccctggaaatacttgagagtaagttccagttcaggcttggtgtcgccttcaactttaaaatcttcgataaaaccttcttccttcagcacgttggcgattgccactttcagcttggaggaaggcatggtgaccgcagctttgttcgcggcctgaccgttacggatacgggtcagcatatccgcgatcggatcttgcatgctcatctgtctttactcccgtgattcaattggtgacaattaccagctagcctttttcagacccgggatttcaccgcgcatagcggcttcacggaccttaatacggctcaacccgaacttccgcaggaaaccatgcggacgacctgtttgacggcagcggttacgctgacgagacgggctggaatcacgcggcagagtctgcagcttgagaacggcattccaacgatcttcgtcggttgcgttcacatcagagatgatagctttcagttcagcgcgtttagcgaagaatttatcagctaaagccacgcgctttacttcgcgtgctttcattgattgcttagccattaagtaaccctaccttacttgcggaacgggaagtcaaaggcagccagcagagcacggccttcttcgtcagatttcgcagtagtggtaatggtaatatccaaaccacgaacgcggtcgactttatcgtagtcgatttctgggaagatgatctgctcacggacacccatgctgtagttgccacgaccgtcgaaagacttagcggacaggccgcggaagtcacgaatacgcggtacagcaatagtgatcaggcgctcaaagaactcccacatgcgttcgccacgcagagttactttacagccgatcggatagccctgacggattttgaagcctgcaactgatttgcgtgctttggtgatcagcggtttttgaccggagattgctgccaggtcagctgctgcgttatccagcagtttcttgtcagcgatcgcttcaccaacacccatgttcagggtgatcttctcgacccgagggacttgcatgacagaattgtagttaaactcagtcatgagtttcttaactacttcgtctttgtagtaatcatgcagtttcgccatcgtactactccaaattacttgatagtttcgctgttagacttgaagaaacggacttttttaccgtcttcgaatctaaagcctacacggtcagccttgccggttgccgcattgaagattgcaacgttagaaacctgaattgcagcttctttttcaacgatgccgcctggttggttcagagccggaaccggcttctggtgtttcttaaccaggttgataccttcaacaatgaccttgccggaagacaggacattcttaactttaccgcgcttacctttatctttaccggttaacacgataacttcgtcatcacgacggattttcgctgccatgattcgctccttagagtacttctggtgccagagagataattttcatgaacttctcggtacgaagttcacgagttaccggcccaaaaatacgcgtaccgataggctgctcgctgttattgttcagaataacgcatgcattaccatcgaagcgaatgacagaaccgtccgggcgacgaacacccttcttggtgcgcaccactaccgccttcagcacatcaccttttttgaccttaccacgcggaattgcttctttgatggtgatcttgatgatgtcgcctacgcctgcgtagcgacggtgcgagccacccagaaccttgatacacattacgcgacgtgcaccggagttgtcggcgacgttcagcatagtctgttcttggatcattttagtgctccgctaatgtcaactactactgagacccgaaaattagggtcgttaaaaagccccatatcgagggcgcggcattataacaccacaaaccagatatgggtagaaaaaataaacggctcatcgctgagccgtttatccgtatcgagaatgcgtactctattacagaaccgctttctctacaacgcgaaccagcgtccaggacttagtcttggacagcggacggcattcgcggatttcaaccttgtcgccgataccgcattcgttgttctcgtcatgtacgtgcagtttggtcgtacgtttgatgaatttaccgtaaaccgggtgtttcaccatacgttcgatagcaacaacaatggatttctccattttgtcgctaactacgcgaccttgcagagtacggattttatcggtcattacgcacccgccttctgagtcagtaaagtcttaacgcgtgcaacatcacgacgcacttgcttcagcagatgagtctgttgcagctggccacttgcagcctgcatgcgcaggttgaactgctcacgcagcaggttcagcagctcagcgttcagctcttcaacgcttttttcacgcagctcttttgctttcattacatcaccgtcttagttacaaaggtggttttgatcggcagtttcgctgctgccaggccgaatgcttcacgggccagctcttccggtacaccgtccatttcatacaggactttacccggctgaatcaaggcaacccagtactccacgttacctttacctttacccatacgaacttccagcggcttctcggtgatcggtttgtccgggaatacacggatccagatcttaccttgacgcttaactgcacgggtcatagcacgacgtgctgcttcgatctgacgtgcagtcagacgaccacggccaacagctttcagaccgaaagtgccgaagctaacatccgtaccctgcgccagaccacggttgcggcctttgtgcactttacggaattttgtacgctttggttgtaacatcagcgacgctccttatttacggcctttacgctgctgctttttaggttgagcagccggttccggttgttcaacagcagccataccacccaggatctcacctttgaagatccataccttaacgccgattacaccgtaagtggtgtgcgcttcagaggtgttgtagtcgatgtcagcacgcagagtgtgcagcggtacgcgaccttcacggtaccattcggtacgtgcgatttccgcgccgcccagacggccgctaacttcaactttgatacctttagcgcccagacgcattgcgttctgtacagcacgcttcatcgcacgacggaacataacgcgacgttccagctgagaagtgatgctgtcagcaaccagttttgcgtccagttcaggtttacgaacttcggcgatattgatctgtgcaggtacgccagcgatatccgctacgaccttgcgcagtttttctacgtcttcgcctttcttaccgataacgatacccgggcgagcggtgtgaatggtcacacggatgctcttagccggacgctcgataacgatgcgagatacagacgctttagccagttctttagtcaggaactgacgtactttaaaatcgctgtccaggttgtcagcgaattctttggtgttcgcgaaccaggtagagttccatggtttgacaatacccaggcgaataccattaggatgtactttctgacccattgctagtctccagagtctcagcgatcggacacaaccacagtgatgtggctggtgcgcttcaggatgcgatctgcacgacctttagcacgcggcataatgcgcttcatgctcgggccttcgtctacgaaaattttcgcaactttcagatcatcaatgtcagcgccatcgttgtgttcagcgttagcaatggcagattccagtaccttcttgaccagtacagcagcttttttgttggtgtaggtcagaatatccagggcctgcgacactttcttaccgcgaatcaggtcagctacaaggcgaaccttctgagcagaagaacgagcatggcgatgttgagctaaagtttccatctcttcctcctaccttatttcttcttcgcttttttatcagcagcgtggccgcgataagtacgagtcggtgcgaattcacccagtttgtgaccgaccatttcgtcggaaacaaatactggaacgtgctgacgaccattatggacagcgatggtcaaaccgatcatgttaggaaagatcgttgaacgacgggaccaagtgcgcaggggcttcttgtctccgctttccaccgctttctctaccttcttcagcaagtgcaggtcaataaaaggacctttcttgagagaacgtggcatggcttatcctctaaaattatttgctacggcgacgtacgatgaatttatcagtacgcttgttgctgcgggtcttcttacctttggtctgcaggccccacggggataccgggtgcttaccaaagttacgaccttcaccaccaccatgtgggtggtctactgggttcatcgcagtaccgcgaacggtaggacgaacaccacgccagcgtgcagcacctgctttacccagaacgcgcagcatatgctcagcattgccaacttcgcccagagtcgcgcggcagtctgcttcgactttacgcatttcaccagaacgcagacgcagggtgacataagcaccgtcacgagcaacgatctgaacgtaagtaccagcggaacgagccagctgaccgcctttacctggtttcatttctacgttatgaacggtagaaccaaccgggatattgcgcatcggcagggtgttgcctgctttgattgcagcatcaacgccagactgaatctggtcgccagctttcaggcctttcggggccaggatgtaacggcgctcgccgtctttgtacagaaccagcgcgatgttcgcggagcggttcggatcgtactcaagacgttcaacaactgccgggataccatctttgttgcgtttgaagtcaacaatacggtaagcctgcttgtggccaccaccgatatgacgggtggtgatacggccattgttgttacgaccaccggatttgctgtttttttccagcaacggagcaaaaggtttgcccttgtgcagctctgggttaaccactttaacgacgtggcgacgacccggagatgtcggtttacatttaacaactgccattgtattactcctccgacttactcagcgccgccaacgaagtccagattctggccttctttcagggtgacgtaagcttttttccagtcgctacgacgaccgatacgctgtccgtgacgtttaactttccctttaacaaccagggtgttaacgacttcgacttcgacttcaaacagtttctgcacagcagctttgatttctgctttggtcgcgtctttagcaactttgagaacgatggtgtttgttttttccatcgcagtagacgctttttcagaaacgtgcggtgcgcgcagcaccttcagcagacgttcttcacgaatcatgccagcatctcctcaacttgcttaacagcatcagcagtcattacgactttgtcgaaggcgatcaggctaaccgggtcgataccgttcgcatcacgtacgtcaaccttatgcaggttacgtgcggccaggaacaggttctcgtccagctcaccggtgatgatcagcacatcttccagagccatgtctttcagtttctgtgccagcagcttagttttcggcgcttcaacagagaacttctcgacaacgatcagacgatcctgacgtaccagttcggacagaatgcttttcagcgcgccgcggtacatcttcttgttaactttttgactgtggtcctgcggacgagcagcgaaggtcacgccaccggaacgccagatcgggctcttgatagaaccagaacgcgcacggccggtacctttctggcgccacggttttttaccggagccagtgatttcagcacgagtcttctgagcacgagtgccctgacgcgcaccggctgcataagcaacaacaacctggtgaaccagcgcttcgttgaaatcacgaccgaaggtagtttcggaaacagtcagcgcgctctgcgcgtctttcaatactaattccattgctatctcctcacgccttcacagctggtttaacgatcaggtcgctaccggtcgcacccgggacagcacctttaaccagcagcaggttgcgctcagcgtcaacacgtactacgtccaggctctgaacggttacacgctcattacccagctgacctgccattttcttgcctttgaacactttgcccggagtctggttctgaccgatagaacccggaacgcggtgggacaaggagttaccgtgagtagcgtcctgggtacggaagttccagcgcttaacggtaccagcaaaacctttacctttagaggtaccggttacgtcaacttttttaacgtcagcaaacagttcaacgctaatgttctgacctacggtgaattcttcgccgtcagccagacggaattcccacagaccacggccagcttcaacgccagctttagcgaagtgacccgcttccggcttggttacacggttagcttttttagcaccggtggtaacctggattgcgcggtagccatcgttagccaggtctttaacctgagtaacacggtttgcttcaacttcgattacggttactgggatagaaacgccatcttcagtgaagatgcgggtcatgcccacttttttaccgactaaaccaatcattgtttcaacctctcaatcgctcgatgacctgattaacccaggctgatctgcacgtctacaccggcagccagatccagacgcatcagagcatcaacggttttttcagttggctcaacgatgtcaaccagacgcttgtgagtgcgaatttcgtactggtcacgcgcgtctttgttgacgtgcggggagatcagaacggtaaagcgctctttgcgggtcggcagcgggatcggaccacggacttgcgcaccagtgcgcttagcagtctcgacgatttccgcggttgattgatcgatcagacgatgatcaaacgctttcaggcggatacggattctttggttctgcatgagaccagagctccaattattttatagacgaaatgattactcctcatacccattacgattgatgggagagtgtaaccgttcttacatagtcccccgattggggacattgtttgataacccaaatgcgattaccagggttcatattgaaccggccgtcaactttgacaggcccgcgcattatacgcaaattctggcgcgacgcaagtgctgtttagaaaatcatcaccaggatttgcgcgccttcgcgttagcgcgctgtacggggctgcaatgcggagtaagagtgcggattgtgggatccattcccggaaaatgccttttgtgctgaacgggagaggatgagcatagtgacgcaatgttcatcgatcattgcggggtcaactatgctcgccgccctccccttcttgctgtgctatagcggtttgaccgtggcattatgccaccaggatctgcgccacggtctgttgcccgaccgttacacctgtcccctgctgtggagtggtttacttttttatctctgtctggcgccgcaccagctgcatgatgccgtctggggggcgataacgggctatctctctttggctgcgatttactggctataccgcggtatccgcggctatgaagggttgggttatggagatataaaatatcttgccgccctcggcgcctggcatggctggcgattgctgccgcagttggtcctggttgcctcgctactcgccggcatagcgtgggcaggagcaggtttatacgccagttgcggcaggaagagcaaatggggaagaagcaacccgctgccgtttgggccattcctggcggccgcgggtttttggtgcgggtggcagacgctggctagtctgacactttgatctgcgactgcaggtaattttgcagaccgattttgccaatcaaatcgagttcggtttccagccagtcgatatggccttcttcatccgccaggatctcaatcatcatatcgcggctgacgtagtcatggacgctgtcggcataggcaatagcctcacgcaaattttgcgccccttccagctccagcctcaaatcggaccgcagcatctcttccacatcttcaccgatgccaagtttgccgagatcctgcagattagggataccttcgagaaaaagaatacgctcgatatacttatcggcgtgcttcatttcgtcgatggattcgtggtactcaatatcgttgaggcgcatcaggccccaatttttaaacattctcgcatgaagaaagtactgattaattgcgactagctcatttcccaataatttattgagataacttatgattttgacatcacctttcattatatagtccctccgcttccactcattgaagcgtagtccggcctatagggatgtcaaaagagaagcgtggacttcaggcgatttctttgaattccggcatggtggttaattcatcttccatcacttcacgcgcggcacgaacacacttaccgcattgatttcccacgggaacaaacttacgtaattgctgaaaagattgcggttgaaactggcgcacaacctgacgaatttttttatcgctgacgccattgcacaaacaaacgtacatagaaactcccgttcaatttatgcacaaatattaaatgagaatggttatgattacaatagaccatttgctcattatccgccgcaacgcacgatatgaatagccagcaaaaatccgtttttcgctgaatgacagacagcaaaaagggcgccgaagcgccctttttaattcaaagctaacgaattagcccagaactttagctacaacgcccgcgccaacggtacggccgccttcacggattgcgaaacgcagaccgtcgtccatcgcgatcgggtggatcagggtaacaaccattttgatgttgtcgcccggcattaccatctctacgccttccggcagttcgatggtgccagtcacgtcagtagtacggaagtagaactgcggacggtagcctttgaagaacggagtgtgacggccgccttcatctttggacaggatgtacacttcagattcgaacttggtgtgcgggttgatggtgcccggcttagccagtacctgaccacgttcgatttcttcacgtttgataccacgcagcagaacacctacgttctcaccagcacggccttcgtccagcagtttgcggaacatttcaacgccagtacaggtggttttcgcggtttctttgataccaacgatttcaacttcttcacctactttgatgataccgcgctctacacgaccggtaacaacggtaccacgaccggagatggagaatacgtcttcgatcggcagcaggaacggcttgtcaatcgcacgctctggttccgggatataggtatccaggtggccagccagttcgatgattttcgcttcccactctgcgtcgccttccagcgctttcagagcagaaccacgaacgatcggggtgtcgtcgcccgggaaatcgtactgagacagcagttcacgaacttccatctcaaccagttccagcagctcttcgtcatcaaccatgtcgcatttgttcaggaacacgatgatgtacggaacgcctacctgacgacccagcaggatgtgctcacgagtctgcggcatcgggccgtcagtcgcagcaacaaccaggatcgcgccgtccatctgcgcagcaccggtgatcatgtttttaacatagtcggcgtggcccgggcagtctacgtgcgcgtagtggcgagtcggggtgtcatattcaacgtgagaggtgttgatggtgataccacgagctttttcttccggcgcgttatcgatctggtcgaatgcgcgagcagaaccaccgtaggttttagccagaacggtagtgatggcagcagtcagggtagttttaccatggtcaacgtggccgatagtaccaacgttgacgtgcggttttgtacgttcaaatttttctttagacacggctatattccttactatagtgctctccccttcggagagagcacgggacttaggttttaatcctgtggattatttaccacgggcttcaataacggcctgagcaacgttgttcggcgcatcatcatacttcaggaattccatggtgtatgatgcacgacctttggtcagagaacgcagctgagttgcataaccgaacatttcggacagcggtacttcagcgtggatcttaacgccggttacttcggattcctgaccgcgcagcataccgcgacgacggctcaagtcaccgataacgtcaccagtgttctcttccggagtttctacttcaaccttcatgatcggctcaagcagaactggttttgctttcttaaagccttctttaaaggcaatagacgcagccagtttaaacgccagctcagaggagtcaacgtcgtggtaagaaccgaagtgcagacggatacccatatcaactaccgggtaacctgccagcggaccagctttcagctgttcctggatgcctttatcaacggccgggatgtattcgccaggaattacaccacctttgatgtcgttgatgaactcgtaacctttcgggttagagcccggctccagcgggtacatgtcgatcacaacgtgaccgtactgaccacgaccaccagactgcttggcgtgtttaccttcgatatcggtaactttcgcgcgaatcgcttcacggtaagcaacctgaggtttaccgacgttcgcttcaacgttgaattcacgcttcatacggtcaacgatgatgtcgaggtgcagctcacccataccggcgataatggtctggttagactcttcgtcagtccatacgcggaaagacgggtcttctttagccagacgacccagagccagacccattttttcctggtcagctttggttttcggctcaacggcgatggagattaccggctcagggaattccatacgctccagaatgatcggcgcatccgggtcacacagggtgtcaccagtagttacgtctttcagaccgatagcagcagcgatgtcgcccgcgcgaacttctttgatctcttcacgtttgttagcgtgcatctgaacgatacgaccgaaacgctcacgtgcagctttcacggagttcagtacggtatcaccagagttaaccacaccggagtacacgcggaagaaggtcaggttacccacgaacgggtcggtagcgattttgaacgccagtgcagagaacggctcgtcgtcgcttgcgtgacgctcagccggggtatctttaccgtcgtccaggataccgttgatcgcaggtacgtcaaccggggatggcaggtaatcaattaccgcatccagcatcgcctgaacgcctttgttcttgaacgcagaaccacaggttaccaggatgatttcgttgttcagaacgcgctgacgcagagcttttttgatctcttcttcagtcagttcttcaccacccaggtatttttccatcagctcttcagaagcttcagctgcggattcgatcaggttctggtgccattcatcagccaggtcctgcatgtcagccgggatatcttcgtattcgaaggttacgccctggtctgcatcgttccagttgatggctttcattttcaccaggtcaacaacgccggtgaaaccttcttcagcaccaattgccagctgcagcggaaccgggttcgcgcccagacgggttttgatctgaccaacaactttcaggaagttagcgcccatgcggtccattttgttaacgaacgcgatgcgcggaactttatatttgtttgcctgacgccatacggtttcagactgcggctgaacaccaccaactgcgcagtaaaccattaccgcaccatcaagaacacgcatggaacgttctacttcgatagtgaagtcaacgtgccccggggtgtcgatgatgtttacgcggtgcggttcatactgtttggccataccagaccagaatgcagtagtcgcagcggaagtgatggtgataccacgttcctgctcctgctccatccagtccatggtagcggcgccgtcatgaacttcaccgattttgtggtttacaccggtgtagaacagaatacgttcggtagtagtggttttaccggcgtcgatgtgcgcactgataccgatgttacggtagcgtgcgatgggtgttgtacgagccatttgattcctcgtttatttctttaggcgttcagttaagttatccagagcgggcgactcatctgaagcgcccgcctggtgactatgactccgaagggattaccaacggtagtgagcgaacgccttgttggcttcggccatacggtgaacgtcttcacgtttcttaactgcagtacctttgttgtctgcagcatcagtgagttcgttcgccaggcgcagagccatggatttatcaccgcgtttacgagcagcttcaacgatccaacgcattgccagggcattacgacggaccggacgaacttcaactggaacctgataagtagaaccacctacgcggcgggacttaacttcgacagtcgggcgcacgttttcgagcgcaacttcgaaggcttccagttcagatttaccagaacgctgagccagggtctccagcgcgctgtatacgatagtttctgcagtagattttttaccatctaccatcaggatattgacaaatttagccagcagttctgatccgaacttcggatccggcagaattttacgctgaccaatgacgcgacgacgtggcatggaaatactccgttgttaattcaggattgtccaaaactctaagagtttagtatgacattaagataaatcagtttggccttacttaacggagaaccattaagccttaggacgcttcacgccgtacttggagcgagcctgcttacggtctttaacgccggagcagtcaagcgcaccacgaacggtgtggtaacgaacacccggaaggtctttaacacgaccgccacggatcaggatcacggagtgctcctgcaggttgtgaccttcaccaccgatgtaggaggtgacttcgaaaccgttagtcagacgcacacggcaaactttacgcagtgcggagttcggtttcttaggagtggtggtatatacgcgagtacatacgccacgtttctgcgggcaggcttccagcgctggcacgttgctctttgcaactttgcgcgcgcgtggtttgcgtaccagctggttaattgttgccattaaatagctcctggttttagcttttgcttcgtaaacacgtaataaatcgcctcatatattatgaggacgcagaattttagggcggtgccgaaaaggtgtcaagaaatatacaacgatcccgccatcaccaggccaactgaccggcatgtttgactgtgagtctgacgaaatcagtatagctaaccctgccgacactgtccgcaatttgaccagccagcccgcgggcgtcaacgtcgtcttgcagcacgtatagggttatgggggcggattgcaggatctcaaggaagcgaccatcggcgatggccgcggtgacgccgtcagacagtagtaccagatcgtcgccgtgctccatcaaacgaagcatcgctgcgatgtcggcatgccagggggaaacactgagcgtatggagcatgggggcctcagaaacgcaaaatcacatcaaattcatgcagacgggcgcgcagggcatccggcgccaggcattcgacatccaccacccacggggtcgcgggatccaggccgcgctctcgcgctgagtcggcgcacagccagcactggtcgatatcatatagcgacagcaatttaaaggtagcgatgtagtcgcgggccagcacagcgccaggccgctgttcgggtaacagctgaaacacgccgtcgcccacaaaaaacacgccaatatcgtcggtgagcgcggaggttgctaataaggcatcgaggccttccctgccggcggcgctgccgtgcggcgcagaggaaagtacaaaagccacacgtttcatcagaactgcaccatccgatcgcaagtaagcgccgcttccgctagcgcgccgagcccgctcaaggtaaaacccggctgcaaattgtggccaggcagagcgagctgttgcgcttcgcgttcgtccgttacgccacgacgcagggcggccgccacgcagatatgcagcgcgacgccgtgctcatcgtggagggattgccacccgcgcaccagatcgaactcatcgctggcgggcgccgtcaactggttagcgttaagcacgccttcgcgatagaaaaaaacgcacgccagctcatggccttcctgcagcacggcctgggcaaattgccaggcgctgctcgcctgctgcgtgccataggctgggccggtcaccgtgagggcaaaacgcattacttatccagcccctggaaatcgccgcttttgaactggcgaatatagaggtagacggtgtgcttggagatgttcagacgatcggctacctggttaatagcgtctttaatatcgaagatccctttctcgtagagattcagcacgatttgacggtttttcgcattgttagacacgctgcgatcggcattcacctcttcaatggtgaactccagcgtctgggcgaccagatcgtctaccgaagaagcaaagttcaccggcgagttcacttcaggcgtttctggcggaataaaggtgctcatgatctgggaaaacggcacatccagattcatgttgatacacagcagaccaatcacccggtgatcgcggttgcgaatggcaatcgtcaccgacttcatcagtacgccgcttttagcacgggtaaagtagcatttggaaacgctgctatcggcgcccgtcatatcgtgcagcatgcgcagcgcaagatcggtaatcggtgaaccgatttggcggccggtatgttcaccattggcgatacggatggcagagcatttcagatcctgcaaagaatgcagcacgatttcacagtgcgaaccgatgagcatcgccaacccgtccactaccgcttcataagatttgagaatatcgaaatcggtctggtcaaagggacgttgatccagcaggtcaagctcgctggtttcattggttaaaagcgacctggacatgaaaaaaagcactccttttcaggagcctgtcgttattgtcagggcaggctcatcatcattattaagctatctaaagtaatacagcgcctgaggatctttccagttttaattatatctgcgctcaataaaaaagccgccgcctctgacgagacggcggcctgaacctgattacttcttagcgtcagctttcgcgtccgcggctttcgcatcgcctgcggcttccggctgtgcatctgccttcggcgccggtttgatatccagcagttctacatcaaagaccagcgtagagttggccgggatgcccgggacgccagttttaccgtaggccaggtccggcggaataaccagcttgattttgccgcctttcttgatgttcttcaggccttcagtccagcccgggatcacgccgtcgagacggaaagagagcggctcgccgcgagtataagagttatcaaactctttaccgtcgatcagggtacctttgtagtttaccaccacggtatcgctgtctttcggcgcatcgccagcgccttctttctcgactttatacagcaggccagtttttgaggttttcacgcccttctctttggcaaagctgtcacggaacgctttgcctttggcttcgttctcagtggcgtctttttccattttctgctgagccgcggtcttcacgcgcgtttcaaaggcctgcagagtctgttcgatctcctggtcggacagtttgctcttatcggcaaacgcgtcctgtacgccggcgatcagctgggctttatccagcttaatgcccagtttctcttgttctttcagggagttttccatgtaacgccccagggacgcgcccagcgcataggccgatttctgatcgtcatttttaaatgccgatttactctcagccgccggggctgccttcgttgccgtatctgcagcgaaggtcaacggtgcattcagggcgacggccattgtggccgccagcagcgttactttaaacagtgatttcatccatttctccagggccggggcctctcaccccagggttatcgtaaaaagcaaaaaacgtactatagaacgttgccgttaaaatctacatacggacgttcctgaatatcgcctcttttaggactatttttgtatgaataagtttcctgtacggcgcagcgatgctgcgcgccaggggaaacttaagtagaatccgcccgcaggatcagactaaagaggttacccatgcacgatagcacattagaaacgcgccttgcggagctggaaagccggctggcgtttcaggaaatcaccatcgaagacctcaacaaaaccgtgaccgcccacgagatcgagatggcgaagatgcgggagcatatgcgtctgatgatcgagaagctgaaggcgacccaaccctcccatatcgcctcccaggcggaagaaacgccaccgccgcactattgaggcgtaaaaaaagcgggtttccccgcttttttgtcgtcttcgtgccgaagcgcaaagattagtggcagccgcagccaccgtggccgccgcagccgcctttaccatggtcgtgaccatgatcgtggccgtggccgccgcagcaaccgtcatgaccatggtcatgatcgtgatcgtggccatgcgcgccgtgcacgtgaccgtgctccagctcttccgcagtcgcttcgcggatggcgacgacttccacattaaacttcaggttctggccagccagcatgtggttgccatcaaccacaacgtggtcgtcttcaacttcagtaatttctactggtaccggaccctgatcggtttccgccaggaagcgcatgccaacctgcagttcatcaacgcccatgaagacgtctttcggtacacgctgcaccaggttttcgtcatactgaccgtaagcgtcgttagcgccgacggcaacgtcaaatttgtcgcccacttcgtggccatccagcgcgttttccaggccggaaatcagggagccgtgaccgtgcaggtaatccagcggcgcgcttaccggagactcatcaaccaacacaccgtcttctgtacgtacctgataggccaggctgaccaccaggtcttttgctactttcatgatatctcctgagatgggaagaatagtggcgcagattgtagcggaattctgctgccgtgtaccctttagcttaaaaaagccgacggataacgctagtcgggatgaaaaatgccaatcacctgctcctctttgcgtacatgctcacgggcctctttatctgcctcacgcatctgatgaccgcacttaacgcactcaacaacatcgacattattctcacgccacattgccagcgaatcctgcgcctggcacgccggacatttcgccccggcaataaaacgtttacgcactgccataagatttacctttattcaaactcgtcccagccgtccagctgccggctctctttctgcatttcgcgctggaaaatctcttccagttcgcgccgggcctcccgcacgcgtgatatctgtaccgtatcagtatgcactggcattagctcgcgcagcattcgcatatcgaggcgtcggaagtgcagctgcgcgcgctgggcctggtgaggatgcatcccgagggtgatgagcgctttgcgccccagctccaacgcactggagaaagtttcacgagaaaactgcgtcacgccggcctgcagcagctcatgcgcctcaacgcgcccgcgagcgcgggccagaatatgcagatgtggaaagtgttgttgacacatttccaccagccgcatggtatcttctggctcattacaggtgatgacgatcgactgcgcctcttccgctcccgccgagcgcagcagctccagctgggtggcatcgccaaaatagactttatagccatagttgcgcatcagatttaccgcgctgatgtcccgctccagtaccgtaatacgcatcttattggccatcagcaggcgaccaatgacctgaccaaagcgaccaaacccgacaataatcacctgcggcttgtcatcctccacccacggcgcctcaccggtatcgtccgccgggttcagccgtcgcgacaatagcttatctatccccttcatcagcagcggcgtcgtcatcatcgacaacgttaccgccaccagcagcagcgccatctggtcgtgctgaaacaaccgctgagaggcgggcagcgaaaagaggacaaacgcgaactcgccgccctggcttaatacgcccgcgaactgcatccgctcggaacttcgcaggccatagagacgggccagcagatagagcaccagcatttttaccgccaccagcaccgccacgctcaccgccacccacagcagatgggtatacagtacgccaaggttcagcgccatgccgacggaaataaagaacaacccgagcagcagccccttgaacggatcgatagcgatctccagttcgtggcgatactcactttccgccagcagcacgccggcaataaaggtgcccagcgccatcgacagccccagcgcctccataaacagggcagatccgaggaccaacagcagcgtggcggcagtgaacacctccctgacccccgagctggcgataaaacggaacaccggccgcagcagatagcgtccgccaatcagcatcccggcaaaggccaggaccttcatgccgaccgtcaaccagttcacatgctcatccgctgaaccggccagcaggggcaccagcgccagcgccgggatcaccgccagatcctgaaacagcagcaccgaaaagcctagctgtcccgcttcgctgcggctcattcccttctcacgcatcagctgcagcgccatggcggtggaagacatcgccaggccgatcccgccgaccaccgccgcctgccatgaaaacccggtcgtcatcagcaacccaccgaggatcgccgcgctgagcatcacctgcgccgcgccaacgccgaagatggagctccgcagtcgccatagcttggcgggattgagctccaggccgatgataaacatcagaaacactacgccgagctcagagaaatggagaatttcatccacatcgctgataaacccgagcccccacggaccaatggcgatcccggccagcagatagcccagcaccgcgccaatccccagtcttgaagccagagggacggcgatgacggccgcgaacaaaaacaacacccccgccagcagcaaatcagatcccgccatggacacctccggcggcgatggggttggccaaccagtcccggtaggccagggcgcggctgcgcagctcctctggctgctgcctccgggcccagtagacgataatggggctcatccagtgcatacggcacatgccggcggtcagttcaaaaggacgtaaaatatcgttcatcggatagcgattagcatcgcgacggtaggcgctctcaggctcgccggtagtgatcacgctgcgccagtactttcccgccagttcgttccctccggcgccgctggcgaagccgcggcttaacacacgatccagccactccttaagcagcgccggacagctccaggtatataaagggtgctggaaaacaatcacctcatgctggcgcagcaggtcctgttcgtaagcaatatcgataaaaaaatccggatagtgcgcgtagagatcgtgcacggtgacgttcggcaactgtaaggccggctctaataaaacccggttggccacggaatcctgagattctgggtgggcatacagcagcaacactttcgctgtctgagacatcattcccctcccgtaggtcttctggcggcctgcacagccccggcgttttgacacagccagaatgactttgtgtatcgtcttcgttttgggctaccatggcggcccggtgaagcgattcgcttccacactacattatcataatgacaaattaacatagtctgaacatacggcgccttatgattgttttctcctcgttacaaattcgtcgcggcgtacgcgtcctgctggacaacgccaccgctaccatcaatcctggccaaaaggtcggtctggtggggaaaaacggctgcgggaaatcgacgctgctatcgcttttgaaaaacgagataagcgctgacggcggcagtatgacctttcccggcaactggcagctggcttgggtgaatcaggaaaccccggcgctaccgcagccggcaatcgattatgtcattgacggcgatcgagagtatcgccagctggaggccgcgctccagcaggctaacgaacgcaacgacggtcatgctatcgccaccgtccacggtaagctggacgccatcgacgcctggacgatccgttcgcgcgccgccagcctgctgcacggtctgggtttcagcaatgaacagcttgagcggccggtcagcgatttttccggcggctggcgtatgcgccttaacctcgcccaggcgctgatctgccgctccgatctgctgctgctcgatgaaccgactaaccacctcgatctcgatgcggtgatttggctggagaagtggctgaagggctatacgggaacgctgatcctcatctcccacgatcgcgattttctcgatcctatcgtcgacaaaattatccatatcgaacagcagacaatgtttgagtacaccggcaactacagttcgtttgaagtgcagcgcgccacccgcctcgctcagcagcaggcgatgtacgaaagccagcagcagcgcgtcgcgcacctgcaaagctatatcgatcgcttccgtgccaaagccaccaaggccaagcaggcgcaaagccggatcaaaatgctggagcggatggagcttatcgctccggcgcacgtggataacccgttccacttcagcttccgccagccggagagcttgcctaacccgctgctgaagatggagaaagtcagcgccggctacggcgagcgtattattctcgactccatcaagcttaacctggtgccgggctcgcgtatcggcctgctgggccgcaacggcgccgggaagtcgacgctgattaagctcctggcaggcgagctccagcccgtaagcggcgagatcggcctcgcgaaaggcatcaagctcggctacttcgcccagcatcagctggaattcctgcgcgccgatgagtcgccgctgcagcacctggcgcgtctggcgccgcaggagctggagcagaagctgcgtgattatctcggcggctttggtttccagggcgataaggtgagcgaagaaacccgccgcttctccggtggagaaaaggcgcgcctggtactggccctgatcgtctggcagcgccctaacctgctgctgctcgatgaaccgaccaaccaccttgacctcgatatgcgtcaggccttaaccgaagcgctgatcgactttgaaggggcgctggtggtcgtatcgcacgatcggcacctgatccgttccaccactgacgatctgtacctcgtccacgatggtaaagtcgagccgttcgacggcgatctggaagattatcagcagtggctcagcgactcgcaaaaacaggagtcccagagcggcgagccgccaaaagagagcggcaacagcgcccaggcgcgcaaagatcagaagcgtcgggaagcggagctgcgcagccagacccaaccgctgcgcaaagagatcgcccgtctggaaaaagagatggacaagctcaacgcgcagttggccagtgcggaagaaaaacttggcgacagtgagctttatgacgcctcacgtaaagccgagctgaccgaatgcctgcagcagcaggccagcgcgaagaccgggctggaggagtgcgagatggcctggctggaggcccaggagcagctggagcgcatgcttcaggaaggctaaactcttcctcttcatcctgcctgcgcgtacgctgccgctggcagggtgggtttctgccctcttcatggtctggccatcagcgacatcaatgatttgtttttgctgtaagctggcgtcactggccgcaagaccacatattggctaaccccctgcatgccctgcgcggtatagtcatcatcacgtttattaattgttctggtgctatggttgaaatcatccccacagacatgacgcccccgaaaacgattcgcgtgagttccatccgatgcgcggcgtgggcaatcgtcatctgcaaaccatgctgccgcggctgattcgccgtaaattgcgctttaccccgcactggcagcgccttgagctgccggacggcgattttgtcgatctggcctggagcgaagacccgcaccaggcgcgccataagccgcgcctcgtcgtttttcacggcctggaaggcagtctgcacagcccgtacgcccatggtctgatccacgcggcgatgcagcgcggctggctgggcgtggtgatgcatttccgcggctgcagcggcgaacctaaccgcaatcaccgcatctatcactccggcgaaacggaagatggcacctggtttttgcactggctgaagcgcgagtttggtcccgcgccgaccgcggccgtcggctattcgctgggcggcaatatgctgggctgcctgctggcagaggaaggcgaccgctgcccgctggatgcggcggtgatcgtctccgcgcctttcatgctcgaagcctgcagctatcatatggataagggcttctcgcgggtttatcagcgctatctgctcaatctgttaaaagccaacgcttcacgcaagctgaaagcgtacccgggctcgctgcccgtcgatttacgccagctcaaagggatgcgccgcatccgggaatttgacgatatgatcaccgccaaaatccatggctttgccgatgcgctggattattaccggcaatgcagcgccatgccgcggctcagcgatatcactaagccgacgctcatcattcacgcgaaagacgatccgtttatggatcaccactctattccgccgcaggagcaactgcccgcgaacgtagagtatcaattgaccgagcaaggcggccacgttggctttgtcagcggcactctgcgtaaaccggagatgtggctggaaagacgcattcccgactggttaaaccgctggcaggaggttcccgcatgattattccctggcaggatctggatcccgaaacgctggataacctgattgaaagctttgtgttacgtgaaggcaccgattatggtgaacatgaacgttcacttgccgataaagtcgccgatgtaaaacagcagctgaaacgcggagaggcggtccttgtgtggtcggaactgcatgagacggtcaatattatgccgcgcgcgctgtttaacggctaaggcgacgccactacatcgtttaaccagggagttgttatgtctgccaaacatccggtgatcgccgtcacgggctccagcggcgcgggcactaccaccaccagccttgcctttcgcaaaatcttcgcgcagctaaacctgcacgccgcggaggtggaaggcgatagctttcatcgctacacccgcccggaaatggacatggcgatccgtaaggcgcgggatcagggtaaacatatcagctactttggcccggaggcgaacgacttcggcctgctggagcagacctttgtcgactatggtcgccacggcaaaggtcagtcgcggaaatatctccacacctatgacgaagccgtgccgtggaatcaggtgccggggacctttaccccctggcagccgctgccggagccgacagacgtgctgttctatgaggggctgcacggcggggttgtcacgccgcagcatgatgtcgccagccatgtcgacctgctggtcggggtggtgcctatcgttaacctcgagtggatccaaaagcttattcgcgacaccagcgaacgcggccactcccgggaggcggtgatggactcggtcgtccgctcgatggaagattacatcaacttcattaccccgcaattttcccgcacccatatcaactttcagcgcgtgccgacggtggacacctccaacccgtttgccgccaaagcgatcccctcgctggacgagagctttgtagtgatccatttccgcaatctgcagaatatcgatttcccctggctgttggcgatgctgcagggctcgtttatctcgcacatgaacaccctggtggtgccgggcggtaaaatggggctggcgatggagcttatcatgacgccgctggtcgagcgcctgatggaaggccgtaagataggctaaccaaaaaaccccggcctggccggggttgagattcgatacaacggcaggcgaagactacgcctcgatcacttcataggagtgggtgatgttcaccgctttttccagcatcagcgccaccgagcagtatttctctgccgacaggtccaccgcccgggagaccgcggcatctttcagcgccttgccggtgacgataaaatgcagattaatatgcgtgaacagacgcggagcctcttcgcgacgctcggaggtcagcttcacttcgcaattggtcacgtcgtgacgacctttttgcagaatggagaccacatcgatcgcactgcaaccgcccgccgccatcagcaccatctccatcgggctgggagccttatccccggagttgccatccatcagaatctggtgtcccgatgcggactccccgataaaggttaacccttctacccatttcacacgcgcttgcataaaatttaactccagtatcgcaatattcctgtcagattacgcgcacataacaattctcgcaacggaaggcgacctgcgtcatgctgaagcgagacaccaggagacatgcggcgaaagctatgctaaaacagtctggatgctacagtaatacattgatgtactgcatgtatgcagaggagttcacattacgggctgtcgaaaaatcatcagccagcttcccaggtatagggaaacaatacgattgcatgcccggacgccgtgtagtgtcggcgcccggagatagcttataacagaggataaccgcgcatggtgcttggcaaaccgcaaacagaccctacccttgaatggttcttgtctcattgccacattcataagtacccatcaaagagcacgctgatccaccagggtgaaaaagcagaaacgctgtactacatcgttaaaggctccgtggctgtactcatcaaggatgaagaaggtaaagagatgatcctctcctacctcaaccagggcgatttcatcggtgaattaggcctgtttgaagagggtcaggaacgtagcgcctgggtacgggcgaaaaccgcatgtgaagtggccgaaatctcttataagaaattccgtcagctgatccaggtgaacccggacattctgatgcgtctctcttcgcaaatggctcgccgtctgcaggtcacgtctgagaaagtgggcaacctggccttcctcgacgtgacgggccgtatcgcccagacgctgctgaacctggcgaagcaaccggatgccatgacccacccggacggtatgcaaattaaaattacccgccaggaaattggtcagatcgtcggctgctctcgtgaaaccgttggtcgtattttgaaaatgctggaagatcagaacctgatttccgcgcacggtaaaaccatcgtcgtctacggcacccgttaagttgctaagcggcgtattgctcccgcagtacgccgtttttgtttttccctcatgtggcgcaggctgatttaccacccggaagtcaactatgcactgcggcaaacgctggtgctgtgtctgcccgtggccatcggtcttctgctcggccatctccagcaggggctgttattttccttagtccccgcctgctgcaacattgccggtcttgataccccgcataagcgctttttcaaacgcctgattatcggcggctgcctgtttgccggatgcagtctggtggtgcagttgctgcttgcccaggcgatacccctgccgtttattctcagcggcctggcgctcttgctcggcgttaccgcggagatcagttcgctgcacgcgcggctgctgcccgcgtcgctgatcgccgccatctttaccctgagcctggcgggcaatatgcccatctgggagccgctgctgatctacgccttcggcacgctgtggtacggcgtgtttaactggttctggttctggctgtggcgcgaacagccgctacgggagtcgcttagcctgctttaccgggagctggcggactactgtgaagccaaatacagcctgctgacccagcataccgatccctcgaccgccctgccgccgctgctcacccgccagcagaaagtggtcgatctgattactcagtgctatcagcagatgcatatgctggccgctaaccaacgcaacgatcataagcgcctgctgcgggcgtttcagatggggctggatctgcaggagcatatttcggtcagcctgcatcagccggaagaggtgcaaaagctggtggaacgcagccatgccgaagcggtgatccgctggaacgcgcagaccgtcgccgcccgcctgcgcgtgctggcggatgacatgctctatcatcgctttccaaagcgctttcagatggataaacagatcgaggctctggaaaagatcgccagacaacatccggataacccggtcggccacttctgcgcctggcacttcagccgcatcgcccgggtgctgcatacccagcgcccgctgtatgcccgggacctgatggccgacaaagagcgtcgtttaccgctatttcccgcgctaaagaactacctgtcgctaaaatctcccgcgctgcgcaatgccgcccgcatcagcgtgatgctgagcgtcgccagcctgatgggcaacgccctgcacttgcctaagccctactggatcctgatgacggtgcttttcgtcacccagaacggctatggcgccacccgggtgcgtattgttcaccgggcggcgggaacgctcgccggcctgacgatcgccgggcttaccttgcattttcacgttccggagagctacaccctgagcgggatgctgctgattaccctgctcagctatctgatcattcgcaaacactatggctgggcgatggtaggctttacggtgacggcggtgtataccctgcagctgctgacgctcaacggggaacagtttattatcgcccggctgatcgacacccttatcggctgcctgatcgccttcggcgggatggtctggctgtggccgcagtggcagagcggcctgctgaaaaaaaatgcccacgatgcgctggaggccgaccagcaggcgattcgcctgatcctcagcgccgatccaaaagcccccgcgctggcctatcaacgcatgcgcgtcaaccaggcgcacaacgcgctctacaactccctgaatcaggcgatgcaggaacccgggtttaatacccactatctggaagatatgaagctgtgggtgacgcacagccagtttatcgtcgaacacatcaacgctatgaccaccctggcccgggagcatacgatgctgaccccggatcttgcccagcgctatctcgaatcctgtgagattgcgctgcagcgctgccagcagcggctggacagcgatggtcccggcagcgcaggggatgccaatattatggagtcgccggaaagcgaggcgccgatcggtccgttaagcaccctggagcagcatctgcaacgcattctgggccatctgaataccatgcacaccatttcatcagtggcatggcgtcagcggccgcaccatggcatctggctgcggaagatcagccgttaatcacctttgccacggcctgagcaaagcgcgccatcccctcggcaatatcctgctcgtcgatgatcagcgagggaacaaaacgcatcacgtccggcccggcgttgagcaccatgacgccggcgtcggccgcggcatataggaaatcacgcgcgcggcctttgtgctgcggcttgagttccgcgccgatcagcaggcccatcccgcgtatatcactgaacagatcaaactcggcatccagccgctgcaggtgtttgacgaacagttcgcgcttcgcgctcacgccatccagcaccgccggggtattgatcagatcgaaggcggcgttggcgaccgcgcaggccagcgggttgccgccgtaggttgagccatgggagcccgcatggaaggcgctggcgatctcgtgggtggtcagcatggcgctgaccgggaagccgccgcccagcgctttggcgctggtcagaatatccggggtcacgccgtagtgcatataggcgaacagcgatccggtacgccccataccacactgtacttcatcaaagacgagcagcgcctggtgctgatcgcacagctcgcgcagtccctgcaggaaagccggcgtggccgccgtcacgccgccttcgccctgaatcggctccaccaccaccgcgcaggtgtggtcatccatcaccgcttttaccgcctgcagatcgttgaagggaacatggacaatatccgccggttttgggccgaaaccatcggaatacttcggctgaccgccgacggaaacggtaaacagggagcggccatgaaaggcattatggaaggcgatgattttggttttatacgggctatggcgggtcaccgcatagtgacgcgccagcttaaaggccgtttcattggcttcggtgccggagttcataaacaccacgcgctcggcgaaggtagcctcgacaagtttacgtcccagacgcagcgccggctcattggtaaagacgttgctggtgtgccacagcgtttcgccctgctgatgcagcgccgccaccagcgccggatggcaatggccaagcgccgtcaccgcgataccgccggcgaaatcgatatactctttcccctgctgatcccagacgcggctgcctttccccttcaccgggatgaattctgccggtgcataaattggcaaaataacttcatcgaatgtggcgcgggtgattgccggttgttcagttgccatgtcttgcccatccctcttcgttacgcagatgcgattatgataatctaatcacaaaatatgcataaaaaatcagtcaatagcaactgaaaatcaccgtttcaaaaagttggccagcaattgatggccctgctcgctgaggatgctttccggatgaaactgcacgccctcgagatcccattcgcggtgacggatccccataatctcaccgctggcgctgcgggcagtgacgttaaactcggacgggagcgtcggcgggtcaatcaccagcgagtgatagcgggtcaccgtcaggggattattcagcccctgaaacaccccttcgccgttatgctcgataagcgaggttttgccatgcatcacctgggccgcccgcacgatagtcgcgccaaacgcctgggcgatcgcctgatgcccgagacagacgcccagcagcggcgtttttccggcatagtggcggataaccgcgagggaaatccccgcctcatccggcgtgcaggggcctggcgagatcacgattttctccggcgccagcgccgctatctcctccagcgtcaacgcatcgttgcgcctgaccagtacttccgcccccagttcgcagaagtactgatacagattccaggtgaaagagtcatagttatcgataagcaggatcatagcggctccggaacaatcaaaaccgggctattctactcagattcccgcgcttcgcttaccactttgcgaaagatcgccaccagcggggccagatcgcccatcgcgctctgctggcaggccgcactccagccggcggggtcaacgtcacgccagttaagaaggtagccggcatgtatcgccagctgttcaaagaaaatacgctgggtcaggccattgccaagacgaaaagggtgcagcacattaatttcaccatagaaccagctcaggcgttcgatgaaggtatcgcgcggcaggccactgagataatcctcctgctcaagggcctgcatcagggcattcccctcctcctcgatccgggcaaagtggcagaatggcgtatcgcccaggtagaggttcacttcacgcaagcggcccgcccagtcaaacagatcctgatacaactggtgatgaatagcgcacagatagggtaagccgcgtacccgcgggcccagcggcagagtggccgcccgcagcgctgtcatctcaaaggcggcctgctgcagatttttagcctggcggatgccgagacggttgcgcaacacgttcagcgccggatagagataaggatcgcgttcatcgccgaatttatcgctcatactccctccgcaacgtcgccagacgcgccagcgcctcttcggcagtcagcgtaaccagcggcaccgtcacgccttcaaggcgacggctggcctgaaaattggtattgcgtgtctgttcccagagtcgggatttttgcttatcggtgagtggacgcatcgtcgccccccttatcgtcccctgtgtgccacaagtataagcagcaatttcaggttatgccgggaggtgaccgggcgcggcgatagaccaccgcgccgcgggaggattagggcagcactttcgcagagaggataacgaccggtttggtcggcacattctggtacggaccaacgttatgggtctggacctgagagatcttatccgcaacatccatccccttcaccactttgccgaataccgcatagccaaagtcgcgctggccatggtcgaggaaggcgttatccgccacgttgatgaagaactgactggtggcgctatcctgatcggcggtacgcgccatcgcgatggtgccgcgggtgttgcgcaggccgttgtctgcttcattcttgatcggcgggttaggctgcttctgctgcatctgttcgttaaagccgccgccctgcaccatgaatcccgggatcacgcggtgaaaggtggtgttgttgtagaagccgctgttgacgtacttcaggaagttatccacggaaatcggggctttctggctgtttaactcaagctcaatgttacctgccgaagtggtcagcagcacatgcggatcgccctttgccgccatggccggggagaacgctgaaatagcgaaaacggcagccatcgccgccagtgttgatttgagcatggaaattccttaacggagcagaataaaagcgagtgccttgattctaaagagcctttgcatcctgggccagccttttaccaaattttacttagctgtaataattgtaaccgcgcaaacgatctcctttgtagcgaacaagcgtgatgcagatcacattaaaacatgcaaaagataacccatttcacaataaacatttaattacatcacctgaatgaataaaatctgtccgcccggcgcagcgtcaacgcgctttacctttctattcacaggccagtcatgactaacagcaaccgtattaagctcacatggatcagcttcttctcctacgccctgaccggcgcgttggtgatcgtcaccgggatggtgatgggtaacattgcggattatttccatctgcccgtttccagtatgagcaacacctttacctttctgaacgccggtattcttatctctatcttcctcaatgcctggctgatggaaatcgtgccgctgaaaactcagctgcgctttggctttattttgatggtgctggcggtggccggcctgatgctcagccacagcctggcgctgttctccgcgtcaatgttcgttcttggcctggtgagcgggatcaccatgtcgatcgggaccttcctgatcacccatatgtatgaaggccgtcagcgcggggcgcgtctgctgtttaccgactccttctttagcatggcgggcatgattttcccgatggtcgccgccgtcctgctggcgcgcagcatcgagtggtactgggtctacgcctgtattggtctggtgtatgtcgctattttcgtcctgactttcggctgtgatttcccggtgctgggcaaaaaagcccagagtgaaaacagccagccggtggtgaaagagaagtggggcattggcgtactgttcctctccgttgcggcgctgtgctacatcctcggtcagctgggctttatctcctgggtaccggaatatgcaaagagcctgggcatgagcctcggcgacgccggtaaactggtgagcgatttctggatgtcctacatgatcggcatgtggtcattcagcttcatcctgcgcttcttcgacctgcagcgtatcttaaccgtcctcgccgggctcgcgacggtgctgatgtacctgtttatcaatggttcgccggagcatatgccgtggtttattctgaccctgggcttcttctccagcgccatttacacctcgatcattacgctcggttcgcagcagacgcgggtcgcttcgccgaagctggtgaactttatcctcacctgcggcaccatcggcaccatgctcactttcgtggtcaccggcccgattgtggcggccagcggtcccctggccgcgctacacaccgctaacggcctctatgccgtggtattcgtaatgtgctttatcctcggcttcgtctcccgtcatcgccagaacaacgctcaggcggcgtctcactaagccttcggcccctttgcatccgcaagggggctgttcctcataaaagaaagctcctcgccaccgcggtcagtttggatccagctttgcgccggctgggtggtcgcgatcacccttccctggcgaattgaccagcgcaccggcacctggcagcggacggcctcaaagccattctccgccgggagaatgatcaggttagccgggttgccgctgacaatgccgtaatcctcgaggccaaacgtgcgggcgctgttgtcggtgataagctgcaggccgtcgttgatctgctggtagcccatcagctggcaaacatggagccccatatgcaggacctgcagcatattgccggtccccagcgggtaccacgggtcaaagacgtcatcatgaccaaagcaaacgttgatccccgccgccaacagctccttcacccgggtaatgccccgtcgcttcgggtagtcgtcaaaccggccctgcagatgaatattcaccagcggattggcgacaaagttgatgccggagagcttaagcaagcggaacagacgcgaggtataagcgccattataggagtgcatagcggtggtatggctggccgttacccgcggccctatccccgctttcagcgccagcgcggcaacggtttcaacaaagcgcgactgctcatcgtcaatttcatcgcagtgaatatccagtgggcggtcatattgctgcgccagacggaaggcgatatgcagcgattccacaccatattcacgggtgaactcaaaatgcgggatcgccccgacgacgtccgcccccagcttgagggcctcctccagcagcgcctcgccgttggggtaagagaggatcccctcctgtgggaaagcgacaatctgtaactcgacccatggcgccacctcctgtttgacctccagcatcgccttcagcgccgttaacgtgggatcggaaacatcgacatgagtgcggacaaactgcacgccattggcgatctgccacttcagggttttccacgcccgggctttgacgtcctcatggctgagcagcgctttccgctccgcccagcgctcaatcccctcgaacagagtaccggactgattccagttcggctcgccggccgtctgggtggtatccagatggatatgcggctcgataaaaggcgggatcgctagcccgccgcgagcgttcaatacctcgtagctttcatcgtgcgcctcccccatcggcgtgatctcgccaaagcggcccttatcaatggctatttgccacaggccgtcgcggtctgccaggcgtacgttctgaatcaaccaaagcggcgctgctgtcatatcaccctctctattcaatacggcttgttttctgtctaaccccaatcgcggcttacccaattcttgtacacaaaatcagcaaaaaggaaaagtcagcgttttccatgacttataaaaatactgacaaatcaaacgcatacccattaagtggtaggtgaagttgtcattgatttgcatcaataagcctgatggctgaatcgttaaggtaggcggtaatagaaaagaaatcgaggcaaaaatgagcaaagtcagaatcgctattatcggtaacggcatggttggccatcgctttatcgaagagcttctcgataaggcgcctgccggacagttcgacattaccgtgttctgtgaagaaccgcgtatcgcctacgaccgcgtccacctgtcgtcttatttctcccatcacactgcggaagaactgtcgctggtacgcgaaggtttctatgagaaacacggcgtcaaggtgctggtcggcgaacgggcgatcaccatcaaccgccaggagaaagtgatccactccagcgccgggcgtaccgtgttctacgacaagctgattatggcgaccggctcatacccgtggatcccgccgattaaaggcgcggaaacccaggattgcttcgtctatcgcactattgaagatcttaacgccatcgaatcctgcgctcgccgcagcaaacgcggcgcggtagtcggcggcggcctgctcggactggaagcggccggcgcgttgaaaaacctcggcgtggaaacccatgttatcgaattcgcgccgatgctgatggccgaacagctcgaccagatgggcggcgagcagttgcggcgcaaaatcgaaagcatgggcgtgaaagttcacaccagcaaaaacaccaaagagattgttcagcagggcaccgaggcgcgcaaaaccatgcacttcgccgacggtagcgagctgcaggtcgatttcatcgtcttctcaaccgggatccgcccgcgcgataagctggccacccagtgcgggctggcggtcgcccagcgcggcggcatcatggtcaacgatagctgccagacctccgatccggatatctatgccatcggggaatgcgccagctggaacaaccgcgtctacggtctggtcgcccccggctataaaatggcccaggtggccgtcgaccatctcctcggcagtgaaaatagcttcaccggcgccgacctcagcgccaagctgaagctgttgggtgtggacgtgggcgggatcggcgatgcccacggccgcacgccgggcgcccgtagctacgtctatctcgacgaaagcaaagaagtttataagcgcctgatcgtcagcgccgacaacaaaacgctgctcggcgcggtgctggtcggcgacaccagcgactacggcaatctgctgcagctggtgctcaacgccatcgagctgccggaaaacccggattcgctgatcctcccggcccacgccggcagcggcaagccatcgatcggcgtcgataaactgccggacagcgcgcagatctgctcctgctttgacgtcagcaaaggcgacctgatcgccgctatcaacaaaggctgccacaccgtggcggcgctgaaagcggaaaccaaagccgggaccggctgcgggggctgtattccgctggtcactcaggtgctcaacgccgagctggcgaaacagggcatcgaggtcaacaacaatctgtgcgaacacttcgcttactcccgtcaggagctgttccacctgatccgcgtggaaggcattaaaaccttcgacgaactgctggaaaaacacggtcagggctacggctgtgaagtctgtaagccgaccgtcggttccctactggcctcctgctggaatgagtacatcctcaagccgcagcacacgccgctgcaggacagcaacgacaacttcctcgccaacattcagaaagatggtacctattcggtgatcccgcgctcagctggcggcgaaatcacgccggaagggctggtcgccgtgggccgtatcgcccgtgaattcaatctgtacaccaaaatcaccggctctcagcgcatcggcctgtttggcgcgcagaaagacgacctgccggagatctggcggcagctgattgaagcgggattcgaaaccggccacgcctacgccaaagcgctgcgaatggcgaaaacctgcgtcggcagcacctggtgccgctacggcgttggcgacagcgtcggcttcggcgtggaactggaaaaccgctacaaaggcatccgcaccccgcacaaaatgaagttcggcgtctccggctgcacccgcgaatgtgccgaggctcagggcaaagacgtcgggatcatcgccaccgagaaaggctggaacctgtacgtgtgcggtaatggcgggatgaagccgcgtcacgccgatctactggccgcggacctcgatcgcgatacgctcatcaaatatctcgaccgctttatgatgttctacatccgcaccgccgataagctgacccgcactgccccgtggctggacaatatggaaggcggtatcgactatctgcgcagcgtcatcatcgatgacaagctcggtctgaacgaccatctggaagaagagctggctcgcctgcgcgccgccttcgcctgcgagtggaccgagaccgtcaacaatccggcggcgcagacccgcttcaaacactttatcaacagcgaccagcgcgacccgaacgttcaggtggtgccggaacgtgaccagcaccgcccggccacgccgtatgagcgtatcccggttactctggtggaggaaaaagcatgagccagtgggtaaatatctgcagcatcgacgacatcctgccggccaccggcgtctgcgccctgctcggtcagcagcaggtggcgatcttccgtccctaccatgacgacagagtattcgccatcagcaacattgatccgttcttcaacgccagcgtactgtctcgcgggattatcgccgagcatgacggcgcgctatgggtcgccagcccgctgaaaaaacagcgcttccgcctgagcgacggcctgtgcatggaagatgccagccactctatcgcccgcttcgacgcccgcgtgaaagacggacacgttcagcttaaagcgtaagtccttctccctcccccggccacgggggagatataagtaacagttctgaccgacagcgcatgagtgcgggatatgtcgcatgttttgtattacctttgctgctattctacgaccactcgttttctaccccttatttttatgaggttattctgtggatcacttacccatattctgccagttgcgccagcgcgattgtttactggttggcggcggggatgtcgccgaacgcaaagcccgtctgctgctggatgctggcgctaacgtcacggtcaatgcgctcgacttcacgccccagtttcaggtgtgggctgattcacagatgctaactctggtgcagggggagtttatcccctcgctgctggataactgctggctggccatcgcggctactgatgatgagacggtcaaccagcaggttagcgaggcggccgaagcgcggcgtatcttctgtaacgtggtggatgccccgcgccaggccagctttatcatgccgtcgataatcgatcgctcgccgctgatggtcgccgtctcctcgggcgggacatcaccggttctggcgcgcctgctgcgcgagaaactggagtcaattctgcccctgcatctcggccagctggcccgctatgccggccatctgcgcgcgcgggttaagcagcagtttgccaccgtaggcgagcgtcgccgcttctgggagaagctgtttgttaacgaccgtctggcgcagtcgctggctaatgacgatcggcaggcagtcgcggataccactgagcagttactgacggagccgttggagcatcgcggcgaggtggtgctggttggcgccggccccggtgacgccgggctgctcacgctcaaaggcctgcagcagatccagcaggctgacgtggtggtctatgatcggctggtctccgatgacatcatgaatctggtgcgccgcgatgccgatcgggtattcgtcggcaagcgctcaggctaccactgcgtcccgcaggaggagatcaaccagatcctgctgcgcgaagcgcaaaaaggaagacgcgtggtccggctgaaaggcggcgatccctttatctttggccgcggggggaagagctggagacgctttgcgaggcgggcatccccttctccgttgtgcctggcattaccgccgcctccggctgctccgcttattcggggatcccgttaacacatcgcgatttcgcccagggcgtccgcctggtcaccggccacctgaaaaccggcggcgagctggactgggcgaacctggcggtggagaagcaaaccctggtgttctacatgggtctgaaccaggcgccggcgatccgcgagaagcttatcgctcacggcatggctgaagatatgcccgccgccatcgtcgagaacggcaccgctgtgacgcaaaaagtggtcagcggcaccttaggacaactggatattctggcgcagcagatggccagcccggcgctgatcatcgtcggccgcgtggtcggtctgcgggataaactgaactggttttcgaaccattaaccttgcctcccataaagcgacaggcataaaaaagggcgggatatcatcccgcccttttagctgttgcgtcgcttacggcttggcgacaaagccaatcgcttcgtataccgctttcagggtttgagaagcccgcgcgctggccttttccgcgccgtctttcatcacctgattgagaaacgcttcgtcgttacggaaacggtgatagcgctcctgcaggtcaatcagcatgcccgataccgcttcggcgacttcgcctttcaggtggccatacattttgccttcaaaatgctgttccagctcaggaatagttttcccggtaaccgcggagaggatatccagcaggttggagacgcccgctttctctttcagatcgtaacgcactaccggcggctcgtcggagtcggtgaccgcacgtttaatcttcttgaccaccgatttcggatcttccagcaggccgatgacgttgttgcggttgtcgtcggacttggacatctttttcgtcggctccagcagcgacatcacgcgcgcgccggatttagggataaacggctcaggcactttaaaaatatcgccgtagatggcgttaaaacgctgggcgatatcgcggcttagctcaaggtgctgtttctgatcttcgcccaccggaacctggttggtctggtacagcagaatgtcagcggccatcagtaccggataatcaaacagaccggcgttgatgttctccgcgtagcgcgctgacttgtctttaaactgagtcatgcggctcagttcgccgaaataggtgtagcagttcagcgcccagcctagctgggcatgttccggcacgtgcgactgcacgaagatagtgcttttctgcgggtcgatgccgcaggccagatacagcgccagggtgtccagcgtcgccttgcgcagctgctgcggatcctggcgcacggtgatggcgtgctggtccacgatgcaatagatgcagtggtaatcgtcctgcatgtttacccactgacgcagcgcacccatatagttgccaatggtcagttcacctgagggctgtgcgccactaaaaacgatgggcttagtcatgtttcaattcctgagtttcactgtgcggtaacccgagagcgggtaagagttcgttaaactggtcgaagagatagtccggctcgctcagcgcaagcggttcaccatagttataaccgtaggtcagaccaacagagcagcagcctgccgctttggccgcctgaatatcattgcgcgaatcgccgacaaacagcagctcggctggagccagagagagcttttccgccaccagcagcagcggttccggatgcggctttttattctgcacgtcatcgccgccaatcaccacggtaaaatatttcgcaatatcgagcgcgtccaacagcggggcgacaaacggcgtcggcttattggtaaccagcgccagcggcaggcctttggcatacagcgcgccgagcgtatcggccaccgccgggaacaggaaactgccctcttccgccgcttcggcgtaatagcggtcaaacagtttacgcaaaatgcgcagctgctcgtcttgcggaatatcatgatcgtcgacggaaggcttacccatcgccgcacgtaacgttgctcgctcctgacgagcccaggtcagcgcccgctccatcaggacatcggcgccgttaccgatccaggtgataacgcgttcttctcccgccaccggcagctccagggcgtacagggcgttatcaaccgccgaggttagacccggcgcgctgtccaccagcgtgccgtcgagatcaaatgcgatgccgcggatcgcctgtaatttatccatgactcaccttcgctaattcactacgcatttgatcaatgacttgcttgtagtccggctgaccgaagatcgccgaaccggcaacaaacatatccgcacccgccgcggcgatttcgccgatattgctggctttcacgccgccatccacttcgaggcggatgtcgtagccggacgcatcgatgcgctggcgcacttcacgcagtttatccagcgtctggggaataaaggactggccgccaaagcccgggttaaccgacatcagcaggatcacgtccagcttatccatcacgtaatcgaggtagctcagcggcgtcgccgggttaaacaccaggcccgctttacagccgtgctctttgataagctgcaggctgcgatcgacgtgttcggaggcttccggatggaaggtgataatgctggcgccggcttcggcaaaatcaggaatgatgcggtcgaccggcttcaccatcaggtgaacgtcgattggcgcggtaataccgtaattacgcagtgacttcagcaccatcgggccaatcgtcaggtttggcacgtagtggttgtccataacgtcgaagtgcacgacatccgcacccgccgccagcgccttcgcggtatcctcacccagacgggcaaaatcagccgacagaatcgaaggggcaatcaaatactgcttcatccgcatctccttgaaatttatttggtcttaggcggacggtagagcgctaatagctcgtccacctttttacgcgtaccaccgttgctgctgatgctgcgccgcaccttcacaatatgcgtttctgccgcgtttttataccattcctgcgtcagcggcgtgcggtggttggaaatcagcaccgggatgcgctttttcatcagcgattccgccttttgcgccagcagtacctgttgttccaggttgaaactgttggtgtggtaggcggtaaagttcgccgtcgccgttagcggcgcatagggcggatcgcaatacaccactgtgcggctatccgcacgttgcatgcactcttcgtaagattcgcagtaaaactcggcgttttgcgccttctcggcgaaatgatagagctcagcttcggggaaatagggctttttataacggccaaacggcacattgaactcgccgcgcagattgtagcggcacaggccattgtagccgtgacggttcaaatacaggaacagcaccgcgcgacgcagcggatcctggctttggttaaattcatcacgatacaggtagtagcgctcagcgacgttattttccggggtaaacatctcacgggcggcggcgacgtattcgtcggtgcgcagtttgacgatgttgtacaggccgattaagtcactgttgatatccgcgaggatataacgagaaaagtcggtattaagaaataccgacccggcgcccacaaagggctcgatcaagcactcgccttccggcaaatgctttttaatatcgtcaagcagggggaactttccccctgcccacttcagaaaagcgcgattctttttcatgctgcctaactaattacacgttctccggctgtggagaaagctccgacagcatcctgcgcttaagactaccccacggcattatttcaggtcagcctgaacctgatgcagcggttttgcccatggatttttcgcctgcacgtccgccggcagcgaggtgacagcacgtttcgcttcatctttcgatgcatagataccgctcaccagcacgtaccatggttggccgttacgcgacgtttcatagacaacatatttatccagcttctctttcttcgcccagttgttgaggttgtcgtagttagaggagctgctgagctgcagagtatagtgacccgacggcgcagttttcattgagctgacgtcacctgccgtcttcccgctcttcgctgccggcgctgccgcagctgccgttgccgctggcgctgcggtcgtcgtggtcggtttgctctgagcggtggccaccggtttgctttcgctgacggacgttttcgccggagcggtggtcgccgtgctttcaacatgcttcggctggaccggcttcgattctaccggcgttttcgccacggcctgtggcttcgactgcggcttcgcttcgataacggtatgcttacgttcagccggacgcggggtcgctgctgtctgacgctcggtcgcctggcgcggcgccgcggtgccattggcgccattccggattggcgcgacggtagccggttcagtcggcagcgtcgagttagccacggcgccgtccagttggccctgctgctgggtcaacgcattgttcagatcgccctgaacttcgatacgctgctggccctgcggcgcagccgctgcctggccctgcgtcgggttcgcggcaataggcggtaccgttacgtcctgctgtgaggtgctgttagcggcggcagtctggtcctggcccgcagcaggcatgctggcggactggtcgtcagacagattaatgctcttctcgccggaagcggtctgctggctggaagatgatggcgatttcagtgcggaaccgatacccacgatcaacagcagcagcaccagaatccccacacccatcatgatgtactggcgggaggccggtttggccggcgcttttttacgcttgcgcggacgacgctctacaggctgctcttcgagcatctcctcgtcttgcgcatccagttcttcttcgaactcttcctcttcacgctcgcgacgggccttaccagcgcgcgtcggacggccttcatcggcatcaagatcaacatcgtcaaaattgatctgcggatcggcatcacgctcggaagactgacgggaacgaccagcacgacgatcgttgcgatcggctttcatatcgtcttctggtttgaaatcatccatttaacaccccactaaaaggcttatgctcacgattattgcacatcacccgaaatgataacgccgcgcgaacgcggccagaccttcttattgttgcgcctgctgagtatcagcaatcgcgccaagaaccacatcgtgcggcactccgccgcgcagctcgctgcttcctattgcgagcgggagcaccagccgcatttcgccagccagtacctttttatcgcgcatcatatggggcaaatacgcctgcgcactcatttcctgcgggccgcgtaccggtaagcctgcacgcttgagcagatcgataatgcgctgagtatcctgcgcgcggaactgccccagccgttcggacgtgcgtgccgccatcaccatacctgccgccaccgcttcgccatgcagccagttaccgtagcccatttccgcttcgatagcatggccgaaggtatgtccaagattgagtaaagcacgtaacccggtttcacgctcgtcggctgccacaacctccgctttcagttcacagcagcggcgaatgcagtacgccatggcggtatcgtccagcgccagcagcgcatcaatgttgttttccagccagctgaagaattcaccatccaggatcaccccgtacttgatgacctcagccagtccggaagcgagctcgcgcttcggcagagttttcagacagttaagatcaactaccacggaaaccggctgccagaaggcgccaatcatgtttttgccgagagggtggttcactgcggttttgccgccgaccgacgagtcgacctgcgacaacagggtggtagggacctggatgaaacgcacgccgcgctgatagcttgccgcggcgaaaccggttaaatcaccgatcacccccccgccaagcgccaccagagtggtgtcgcggccatgtggtttttgcaacagcgcagtaaacacggtatccatcaccgccaggcttttgtattgctcgccgtctggcagaatgacgctgtcaacgttgacccctgactgctccagcgcagagcggacggtatccagataaagcggcgccagcgtttcgttggtgaccagcatagcctggtcgcccgacttgagtggcaggaaggaagctggatcgttaaacaaaccagccgcgatggtaatcgggtaactacgttccccgagggtaacagtaagcctctccataacgcgacatccacctcaatgactattactctgacgcacttttattaagccagaatcagttgctttccagcatatgaataatctggttcgcgacgactttcgcactctgatcgtctgtgcggatagtcacatcggcgatctcttcatacagcgggttacgctcgtcagccagcgcttccagcacttcacgaggcggcgcatcgacttgtagcaaaggacgctttttatcgcgctgcgtacgggccaactgcttctcgatcgtagtttccaggtagaccaccacgccgcgggcggagagacggttacgcgtttcacgggattttacagagccgccgccagtcgccagcacaatcccctgtttttccgtcaactcattgataattttctcttcacggtcgcggaagccttcttcgccttcaacatcgaagacccagcccacatcagcgccagtgcgtttctcaatctcttgatcagaatcgtaaaattccatgttgagctgttgggctaactggcgcccaatagtgcttttgccggcacccataggcccaaccagaaagatattgcgtttctctgccattttttcggtactactaagactattcgttaatgataaacccgcttcgcagacacccagcgccgcagggcatgaactgaaacctcatatgcaatagagcgagagtcagactaaaaattatctcaatactccggctggtttggcaactgaataaaatcgccggacaataaagggaggattgatgtcgtacccgactctcaaatcggtaccccttgtatgctaaatccgtcctcacgtcaaacacctgaaacgtgtttagcatgaaaaacctgcttaacgtactgccagaatccgtggcgtaataaagacaaccagttcgcgacgttcattatctttcccgtcacgacgaaacagacgtcccagtaccgggatatcgccaagcagcgggacgctgtcgcgggcggttttgtttttctgcgaaaagatgccgcccaacgctaaagtctcgccgctgcgaacttccaccagggtctctatctcctgcttatcgatggccagcgcttcgccgttttcctgcttcagcacctggcctggcgtattctcgcttattcgcagcttaagccgcactcttccctgctgcagcaccgtcggcgtgacctccatgcccagcaccgcctctttgaactccaccgaagtggcgccgctttcgccactggaaacctgataggggatctcgcttccctgcttgatgctggcaggctgcatgtgggaggccaataaacgcgggctggcaataatttcgacctgctgcttgcgctccagcgcggatagctccagctcaagcaagcgaccgttgatcttgccgatgttaaaccctgcgcgggtgctggcatcgtttaccgatacatcgctgcttagggtggtgatttgcccggagcctggcgggcttccggcttccgcaagccgccacttcacccccagctcacgaaggctggtttcgctcatcgacacgatatgggcggccagctccacctggccgaccggcagatccatctcctgcgcccaggccttcaacgccggcaggtgccgggcatcatcgcggatcagcagccgattagtccgcttgtccgccatcaggtgtcccctggcgctgagcagctttccgccgcttttagccagctcctcagcgtcggcaaagtgcagggtcacgctctccgcctgcaggggcaggttctgcaggcgtttctcctgttcggcttcacgctgcgcctgatttgccttttgccaggcctgagtgtgcgcgtagatgaccgtcccctgctgttgcaaagagagacccgcgctatccgctaccgcccgcagcgcctggctccagggaaccttctgcagacgcagggagagcgtgccgctgacgtccggcgcgacgacgaggtttttatggttcatttcggccagggcttgcagcacctgggccactggcgcatcgtcaatcaccagcgaaaccggtttatcattgcgggcggcgggggccaccgccagcggcagcagcagaagcagcaggcttatccatcgcatcatgttgtttcccttcacgttgccagcgccacgctggcggttcacatcccgaagacgtgacgatgtccagctcaccggccgtcagccggctcacccgccagcccgtgggcaattgctcatccatgcgtacccgtcgccactttccgttcccatcctgcagaaaccccgtccagccagcctcatccccaaccgccccgccatagcgccattgcgaaagctgcgccgtgcggcagggatcctcaaccggctggaaagggtcacgctcggccgccagcagcgacagcggtagccacaggaagatccagcgtttaccgctcatcttccgcctccagcagcagtcgcaggcggagcgtctgcgcctcacggcccagcgaaaacgaacgcggattcatcccgcagcgcgccagccaggaaaaaagcgcgggtaccgttgaccaggacagggtcagctccatctcgccgccgcttccctgcggacgccaggcgataagcttcgctccggagagcggaatggctatgggcgaaaatgactgcgtgtcgatgcgcgccccgggattttcctcgccggggatgcgcagcgccatgatccgccgccactgcgtttgcaacgccgcatcacgggttaccgccgcctgcggagggcgcagatcgcgccagagcgccacgccgcctcccgacagccccattgcgagcaggatcggcagccccgtccaggcgccccgaaggttaatccgcatcagcgcgcgctcccgtcagggtaaaactgaactgccaacgcccctcggcgtcgcgctgggtcccgccggcttttgccggcgcgaatcccgcgacgcgagtcagcgcagcctccacgctggttagcgcctgcaggttaagggccaggccgtccagcgtgaggagtacgccctggtactccagccgcgtcagccacgcctgcgcgggcagatctgccgccagcacctgcagcctgggttgccaggcggcgatcgccgatctgcgctggtactgctggcgctgccgttgatgctgctgccacgcctcacgcatcgcctgctcgcgctgcttaagcgaagcgagcagctgcgcgtcggccgtcgtgtgaagcgtcgccaggaagtcgcgctgcagacgcgccgttcggctcaccagcaggcccatcccgcccagcagcacaatgccgatggttaacaacaggacgtagcgcaggcgctggcggcgacgcaggtcgcgccagggaagaagattaacgacatgcgtcattccgcccgcctcccagcgccagcccaagggcaatggcgtaacgatcgccatcggctggcagcgggggctgccgacggtgaatcacttgccagacatcaaagcgactggcctcatcgcccgcgtcaatacacaggcgcagcggaacctgaagctgccccgccagctggcttaaggacccgacatcagcgcaggcgtcactgccccaggcctcacgggtcgcccacagccagtgcttttcatcccgccacgccaggccctggtctgccgcagtcatccaggggaaaaaggcgccgagcgcactggcatccggtacgatggccgccacccgcagccgcagccgccctgccagctcccgcagaacattgatatccagccgctgcgccgccgtaacctgccagccgtcatcccgcgaggtgggcgcataatcaatacatagcgcggaggcaggcattgccagctgctggctcatggcgctggctacccacgtcgcctgttcccgctcccgcaaggcgaactggggatacggaagacgcttttgcagtgtgcgcaccgcgggaaaggcgatactaacctgatgctgcgccggtagctcccgccgccaggcggccagccgcgaaccgagtgcgctgacgtccgccaccattccctgacgtaccagccccggcggcaatgggatacgccaccagcggcgcagcgcccagtgtgaacgttcatgcaatagcgcgacaatggcaatgctatcctgttggatatgcattccaagccgccagtttctgaaagccatgcttacgatctccttatccggcaaaactgcccggctatatcaatgcacctggcttgcctttatactaccgcgcgtttgtttataaactgcccaaataaaactaaatgggaaaacaccggtgaagttcgtaaagtatctattgatccttgcagtctgttgcgtactgctgggagcaggctcgatttttggcctctacaaatacatagagccgcaactccccgacgtcgcaaccctgaaggatgtgcgtttgcagatcccgatgcaggtctatagcgccgacggtgagcttattgcgcagtacggcgaaaagcgccgtatccctgtgacgttgcagcaaattccccccgagctggtgaaagcgtttatcgccaccgaagacagccgcttctatgagcaccacggcgtcgatccggtaggtattttccgcgccgccagcgtggcgatgttttcaggccacgcctcccagggcgccagcaccatcacccagcagttagcgcgtaacttctttctcagccccgagaagacgttgatgcgtaagattaaagaggcctttctggccatccgcatcgagcagttgctgaataaagatgaaatccttgagctgtatctgaacaagatctacctcggctaccgcgcctatggcgtcggcgccgcggcgcaggtctattttggcaaacctatcgaccagctgaccctgagtgagatggcggtgattgccggtctgccgaaagcgccttccacttttaacccgctctattcgatggatcgcgcgaccgcccgtcgcaacgtggtgctgtcgcgtatgctgagcgaaggatacatcacccaggcgcaatacgatgaggcgcgcagcgaacccatcgacgccagctatcacgcgccgaaaatcgccttctccgccccttacctgagtgaaatggtgcgccaggagatggtgaatcgctacggtgagcaggcctacgaagacggttatcgggtctacaccaccattacccgtaaaaaccagcaggcggcccagcaggcggtacgcaataacgtgctggattacgatatgcgtcacggctaccgcggcccggccagcgtactgtggaaagtcggtgaaacgccgtgggagacgaagaagatcgtcgattcgctgaagcgtcagtctggctacggtccgcttttcccggcggtggtcacctccgcgaatgcccaggaggctgtcgcgctgttggctaacggcaactccgtttcgctgacgatggagggcgtgcgctgggcccgtcgctttatctctgatacgcagcaaggggcgaccccgcgtaaagtcaacgacgttgtgcaggccgggcagcagatctgggtacgcaaggtgggtgacagctggtggctgtcccagctcccggacgtcaactcagcgctggtctccattaacccgcaaaacggcgcgattattgcccttgtcggcgggtttgactttaaccagagcaaattcaaccgcgccacccaggcgctgcgccaggtcggctccaacattaaaccgttcctctataccgccgcgatggataaaggcttaacgctggcaagtatgctcaacgatgtgccgatctcgcgctgggatgcgggcgcaggttccgactggcggccgaagaactcgccgccgcagtatgccggtccgattcgtttacgccagggcctggggcagtcgaaaaacgtggtgatggtgcgcgctatgcgcgccatgggcgtagactacgccgccgagtacctgcagcgctttggcttcccggcgcagaacattgtccacacggaatcgttggcgctgggctcagcctcctttacgcccctgcaggtcgctcgcggttattcggtgatggccaacggcggcttcctggtcaatcctttctttatcagtaagattgagaacgatcagggcggggtcctcttcgaggagcgtccgaaaattgcctgtccgcagtgtgatttaccggtaatttacggcgatacgccaaaatccaacgtgctggaaaacaaggatgtggaagatgtcgccacctccgcggaaccgcagaatggcaacgtgccgccgcagccgcagctggagcaggccaaccagtcgctggtcgcgcagagcggcgcacaggaatacgcgccgcatgtgattaacacaccgctggccttcctgatcaagagcgcgctgaacagcaacatctttggcgagccgggctggatgggcaccggctggcgcgccggacgcgatctgcagcggcatgacatcggtgggaaaaccgggaccaccaacagctcgaaggacgcctggttctcaggctacggaccgggcgtggtgacctcggtttggatcggctttgacgatcatcgtcgcgatcttggccggaccaccgcctccggagcgattaaagatcagatctctggctatgaaggcggtgccaaaagcgcccagccggcctgggacagctttatgaagagcgtgctggaaggcgttccggaagaaccgttaactccgccgccgggtatcgtcacggtgaatatcgaccgcagcaccggtcagttggcgaatgggggcaatagccgggcggagtactttattgaaggaacccagcccacccagcaggcagtccgtgaggtgggcaccaccctgactgacggcggcggtgaaacccacgaattgttctgacaaaaaaagcgcctgcgggcgcttttttattgctgcttagcgtggacgctcgttcagagtcggccctgggcctgcagccattcccgcactaaaaacagcgcgctgacgttacgggcctcattaaaatcttcttcatccagcagcgacatcagctgcgccagcggccagcgcacctgcggtagcggctcaggttcatcgcccggcagtgactccggatagagatcttccgccaccatgatattcattttgctggagaagtaggagggggccatactgagcttcttcaaaaacgtcagcttattggcgccatagccaacctcttctttcagctcgcgattggccgcttcatccacggtttcacctggatcaatcagccctttggagaagcccagctcgtaggactccgtccccacggcatactcacgaatcaaaataatgtgatcatccacaatcggcacaatcatcaccgcttcacgggtggaaggccgcatacgttcataaacgcgacgcacaccgttgctgaactccagatcgacgctttcgacattaaagaggcgcgaacgggcgacagtttcaacattgagaatggtgggtttttgtaatgatttgctcattgtcatcggtctatgctgtgattaagcagtcattgtgcgatacgcaacacgctttcggcaatccaaattgctacttatttacagagttgtaaccttttccctgcagggggaaaagtaataaagataaaaaagtcaatagcttgaattcgctttgagaatttaccgatttctgcgctttaacgtttttggtaagcttgtgcgctgctgcatgacatattcactaccctgtaaacaggtgcgccgctaacactgcagcttgacgttagtcttcacgttcaccgacgatttcgtaagaaaaaaataactttgatgggatgggcatgggcacctttctgatattccttacagctctgctaatctgcgtattgctcatcggatggtggtatcgcgctcacgccagacgccgccgactccccctactgctcgcctttagcgacgctaccacgcggcagcttcctgcggatgagcgccaggctattgagaagtatgttgccgagttgagccacgcccagcaggtgccggcgtccggtgcgaccagcgcgcctgtcgctctggcgctgaacgaacagagtgataccgtctatgcggtgacacgcgccatcacccgctacgggatcaccaccgacgcgccgaataaatggcgctatttcctcgattcggttgaagttcatctgccgccgttctgggaacagcatatcaacgatgaaaacagcgtcgagctgatccccaccgacagcctgccgctggttatcacccttaacggtcatagcctgagcgactatcgccaggaagcgcaaagctacgccctggaacgcgcttcggccacccaggcctccattcgcggcgaagagagcgagcaggtagagttgcggcagatccgtcgggaaacgcctgaagaacacgctctgaatcgcccggacgggctgcgcgaagcgatcctgatcgtcgcctcctttctgttcttttatttcagcctgattgggccagctgtctttaccccctggctggtcgccgcaggtttgttgctgctcgccgccggactgtgggggatttatgccccgccgcgtcgcgccgcgctgcgcgaaatccattgcctgcggggcgtccctaagcgctggggattgtttggcgaaaacgatcaggagcaaatcaataacatctcgctgggcattatcgatctcatctatcctcgccactggcaaccctggattgcccaggacctggggcagcagaccgatattgatatctatctcaaccgccacgtggcccgtcagggacgctacctgtcgcttcatgatgaagtgaaaaacttcccgctgcagtactggctacgcagcgcgattatcgccgccggcgccctggtggtggtgattatgctgtgggccagcgtaccgttgaatatgccgtttaagttcaccctgtcgtggctgaagggcgcgcaaacgattgaagccactaccgtcagccagctggaaaaagcccatgtgcgcattggcgatacgctgcgcctgaccggtaccgggatgtgtaacatccgcacgccgggcagttggtccgccaaagaggattcgccgttcctgcctttcgattgttcacagattgtgtggaacgacgcccctcctctgccgctgccggagtctgacattgtcagcaaagcgaccgccctgatgcagtccgtccagcgccagctgcacccggaaaccgacgatgattcccgcgtcagccctgccctacgctccgccattcagaaatcaggcatggtgctactggatgatttcggcgatatcgtgcagaaaactaacgatctctgctcggcaaaggatgattgcctgcggctgaagaatgcgttggtcaatcttggcaatacccgtaactgggaaacgttaaccaagcgcgccaccgccggcaagctggatggcgtgaacgtgctgctgcggccggtcagcgccgagtcgctggagaatctggtgaccacctcaaccgcgccctttgtgatacgcgaaacctcgcgggccgcgcaggcgctgaacagcccggctcccggcggttttcttatcgccagcgatgagggcagcgtactggtcaatcagccgtggccggcggtgagtctgtatgattatccggcccatgagcagtggggcgaactgcggcggctggccggtatgctcatgcatacccccttccatgccgaaggtatcgttaccaacctgtttactgacgccaacggcacgcagcatatcaacctgcatcgcatccccgaccgcagcggcctgtggcgttatctgggcatcaccctgctgctgctgtcaatggtggggtgcatggcttaccacgccgtgcaggccctgcgtcgttatcaacgccatcgtcagcgtatggaagagattcagaaatattacgaaagctgccttaatccggttttgctcccctcatctgactcgcaagattaattttcccggcgacagggtgtgataccctgtcgcccattttccgctcgctggagagtcatcatgcactttgatatcgcctggcaggaggtcgataccgttctgctggatatggacggcacgctcctggacctcgccttcgacaactacttctggcaaacgctggtgcctgaaacctggggggccgcccgcggcctcaatttgcaggaggcgaaagaggccatgcgccaggagtatcacgccgtgcagcatacgctaaactggtactgtctggattactggagcgagcgcctgggtttggatatttgtgcgatgaccagcgaacaaggtccgcgcgccacgctgcgcgaggataccgtgccgttccttgatgcgctcaaggcctgcggtaagcgacgcattctgttgaccaatgcccatccccacaatctggcggtgaagctcaaacacaccggcctggacgcgcaccttgatttattactttccacccacacatttggttatccgaaagaggatcagcgtctgtggcgcgccgtggcggaggaaactggccttgaggcgcacaaaacgctgtttgtcgacgacagcgaggcgatactggatgccgcgagggagtttggcattcgttactgcctgggtattaccaatcctgactccggactggcggaaaagcagtatctgcgccatccggggctgaatgattaccgacgactgatcccttcgcttaccccgaaggagaggcgatgaaagagaagcccaccgaaaccgtcagactggacaaatggctttgggccgcccgcttttacaaaacccgcgcgctggcgcgggaaatgattgaaggcggcaaggtgcattacaacggacaacgtagcaaacccggaaaaatcgtcgaactcgacgccatgctgacgctgcgccagggcaacgacgagcggacggtgcgcattatcggcattaccgaacagcgccgcccggcaagcgaagccgtcaacctgtatgaagagacggcggagagtatcgagaagcgtgaaaaaatggccctggcgcgcaaaatgaacgccctgaccatgccgcaccctgacagacgtccggacaagaaagagcgccgcgacctgatgagatttaaacacggcgagagtgaataactcgcgccagaaagagagatgattatgactcaacacgatcaattacatcgttatctgtttgaaaactatgccgtgcgcggcgagctggtgacggtgtcggaaaccctggaacagattctggcgaatcacacctatccccaaccggtcaaaacggtgctggcggagctgttggtcgccaccagtctgctgaccgcgacgctgaagtttgccggcgacattaccgtgcagctgcagggggatggccctttacagctggcggtgatcaacggcaataaccagcagcagctgcgcggcgtcgcgcgcgtgcagggcgagattgcggacgatgcggatctgaaaacgatggtcggcaacggctacctggtcattaccatctctccggaagaaggtgagcgctatcagggcgtggtcggtctggaaggcgatacgctggccgcctgcctggaagattatttccagcgttcagagcagctgccgacgcgccttatcatccgcaccggcgatcatgaaggccagccgatggcgggcgggatgctgctgcaggtgatgccggcgcaggatgcccagactgccgacttcgagcacctggcgacgcttaccgagaccattaaggcggaagagctgttcaccctgccggcaaatgatgtgctgtggcgtctgtaccatgaagaagaagtcacggtctacgacccgcagagcgtggagttcaagtgcacctgctcccgcgaacgctgcgccggcgcgctgaagacgctgccggatgaagagattgatagcatcctcgccgacgaaggcgaaattgatatgcactgcgactactgcggtaaccactatatcttcaatgccatggatattgccgagatccgtaataacgcctctccggccgatccgcaggttcattaatccccgcatctttctcaggcacagggcggcaatgttgtttgtcgcgttgtgcctgacttttaatttattcgcgagttgaatcgattttccctgaaagagttacgtaatttaatttcaggaaagcgattacattcacatttcagcagtttttttaattactttttaaccattgagaaacatctaaccccaccatccgtccatttcctgagataatccactccacttcgtgacaggagtcaccgtttttatcgtcattctgaggaatgtcgagatacgtaaatctatgagcctggtcgcggtcaatacccggcaattaaccctacaatttacagcagtacatcttggctaaggagcagtgacatgcgcgttaatcatggtttaaccccgcaggatctcaaggcttatggtatcaatgacgtccaggatatcgtccacaaccccagctacgacatgttgtttcaggaagagctcgacccgaacctggaaggctacgaacgtggcgtattaaccactctgggtgctatcgccgtcgacacgggcatttttaccggtcgttctccgaaagataagtatctcgtgcgcgacgacaccacccgcgacaccgtctggtggtccgataaaggcaaaggtaaaaacgacaacaagccgctttcgcaggaaacctggcagcatctgaaagggctggtgacccagcaactgtccggtaaacgcctgtttatcgtcgacgctttctgcggcgccaacgccgatacccgtctcagcgtacgtttcattaccgaagtggcctggcaggcgcacttcgttaaaaacatgttcatccgtccgagcgatgaagagctggctgaattcgagcccgacttcatcgtgatgaacggcgcgaaatgcactaatccgcagtggaaagagcagggcctcaattcggaaaacttcgtcgccttcaacctcaccgagcgcattcagttgatcggcggcacctggtacggcggcgagatgaagaaagggatgttctcgatcatgaactacctgctgccgctgaagggcatcgcctccatgcactgctcagccaacgtcggcgagaaaggcgatgtcgccattttcttcggcctctcaggcaccggcaaaaccaccctctccaccgacccgaaacgccgcctgattggcgatgacgaacatggctgggatgacgacggcgtgtttaacttcgaagggggctgctacgccaagaccatcaagctctctgaagcggccgagccagatatctatcacgccatccgccgcaacgccctgctggaaaacgtggtggtacgcgccgacggcacggtcgatttcgatgacggttcaaagaccgaaaatacccgcgtctcctaccccatcgaccacatcgacaacattgttaagccggtgtctaaagcgggtcacgctaccaaagtgatcttcctgacggccgatgcgttcggcgtcctgccgccggtctcccgcctgaccgccgaccagacgcagtaccatttcctgtccgggtttaccgccaaactggccggcaccgagcgcggcgtaaccgaacccacgccaaccttctccgcctgcttcggcgccgccttcctgtcgctgcacccgacgcagtacgccgaagtgctggtcaaacgcatgcaggcggctggcgcgcaggcttatctggtcaataccggctggaacggcaccggcaagcgcatctcgattaaagatacccgcgcgatcatcgacgccatcctcaatggctcgctggacaacgcggagacctttaccctgccgatgtttaacctgcagatcccgacggcgctcccgggcgtggatacccacatcctcgatccgcgcagcacctatggttccccggagcagtggcaggaaaaagccgaccagctggcgaagctgtttattgagaattttgagaagtataccgatacgccagcgggcgccgcgctggtggcggcaggaccgcagcgctaacgggcgcaaaggtgaaaaagccgggcttgcccggctttttattgtgcaacatcctgagcagctaaccgcgggcgcgatcagctctccctggcgggtttcatcggcgccagcatccggtgcaccggcagccaggcgcggatcagtaacccgccgcgttcgctggagccaatctccagccggccgttgtgattgtcgataatacgctgaacaatcgccaaccccagcccggtgccgctggtgctgcgggcactgtcgccgcgtacaaacggctgaaacaggtgctcccgctgctcaggtttaatccccggtccatcatcttctacctggaaccaggcccggctcgcttcgctgccgctgctgaccttgatccagccattgccatagcgggccgcgttgaccaccatattcgccagcgcgcgcttgatagacagcgggtgcatacgtaccggaatttcgccggcctgcagggcggtggcgatttcccgctcatagccactctccgcagcgatcacttcccccagcaccgcattcagatccgccagctccatcggcatctcctgcccggtgcgcagatagtcgataaactgctcgatgatggcgttgcactcttcgatatctttgttgatcgactccgcgagatagccgtcctgctcgcccatcatctcggtggccagacgaatgcgggtcagcggggttcgtaaatcatgactgaccccggccatcagcagcgtacggtcatcagccaactgcttcacgcccgccgccatatggttaaaggctcgcgtcaccgaacgcacttcggaggcgccatactcgcgcagcggcggcggaataatgccgcgcccgacctgcagcgccgcgtgctccagatccaccaacgggcggttctgaatacgaataaacagccaggcgccgcctatcgccagcagcatgatcgccagggtatagcggaacagcggcgagaagtcgccctgatggatctcggtcagcggcacccgcacccagatattgggcgacagccaggtcttcagccacaccacaggggagcttttattgacctctacccgcacctctgtggggccaccaagctgatgggccatctgctgacttaagaattcataatgctgcgcccagcgcaggcctgcgtcttccgccgcttcattggaatagagcgaaatccccagctcgcgataaatttcacgacgaaacgccgggggcaccaccagctgggtgccatcctccagctgcagtttgtcggtcatcagcatacgcacttcgtaggctaacactttattaaactgctggagactcggcaggatcgcgaaattcagtaccaccagataggtcgtcaccaggctgacgaacagcaaggtgacgatcaggagcagtatgcgagcaaaggagctgcgcggcgaaaagcgcacgcgtttcatgccttagaaccgtccgggacgaagacgtagcccagaccccagacggtctggatgtagcgcggatgcgccgggtcctcttccaccatgcggcgcaggcgggagatctgtacgtcgatggagcgctccatcgcagagtattcgcggccgcgggcgaggttcatcagcttatcgcgcgacagcggctcacggggatggctcaccagcgccttcaggaccgcgaattcgccgctggtcaacggcatcggctcgtcttcacggaacatctcgcgggtgcctaaattcagtttgaatttaccaaaggcgataaccgcctcttcctgcgacggcgcgcccggcagctcgttcgcctggcggcgcagcaccgcccggatgcgggccagcagttcgcgcgggttaaacggcttcggaatatagtcgtcagccccgatctccagacccacgatccgatcgacctcttcgcctttcgccgtcaccataatgatcggcatcgggttactctggctgcgcagacgacggcagatagagagaccatcttcgcccggcagcatcagatccagcaccatcaggtggaaggattcacgggttaacagacgatccatctgttcggcgttcgccacgctacgaacctggaagccctgctcggtcagataacgctcgagcagcgcacgcaggcgcatgtcgtcatccacaaccagaatcttataattctcttgcattgtttgtactcccaaaggttcactgcaatagtcagtgcgtattctcaaaaaagcccggcgcgctcaccagctaaatctggtatatattccaggctaaattgttacaaagcatatttaacagcaggttaagtatacatttaatcataagacacagtatttatcctgtcggtattattacgcgctacaaattgtgcgcaacgacagacagtcagaaggttgaactcacgatgaaaacgccgctgatcacccgcgagggatatgaaaaactgaagcaggagatggactacctgtggcgccaggagcgtccggaagtgaccaaaaaggtgacctgggccgccagtctcggcgaccgcagcgagaacgcggactaccagtacaacaaaaagcgcctgcgggagatcgatcgccgggtccgctatctgaccaaatgtctggaacagttgaaaatcgtcgattactcgccgcaacaggaaggtaaagtcttcttcggcgcctgggtagagattgaaaacgatgaaggcgatatcaagcgctttcgcatcgtcggttacgatgaaatttttggccgcaaagactatatctccatcgactcgccgatggcgcgcgcactgttaaaaaaagaggttggcgatctggccatcgtcaacacgccggcgggcgaagccagctggtatgtcaacgagatcgaatacgttaaatagacaagaactttccgagagacgcccggcgcggctggtatttttagccgtcagtccgtataactagtccctgttttttgaccctaaagatgaattaaaagccatgatgaatgattcgctctgccgcattattgcgggtgaacttcaggccagagccgaacaggtagaagctgccgttcgcctgcttgatgaagggaacaccgtgccgtttattgcacgttatcgtaaagaagtcaccggcggtctggatgacacgcagctgcgtaatctggaaactcgcctcggctatctgcgcgaactcgaagaccgtcgtcaggcgatcctcaaatccatcgctgaacagggcaaactgaccgacgcgctggaaaaagccatcaacaccacgctcagcaaaaccgaactggaagatctctacctgccctacaagccgaagcgccgtacacgcgggcagatcgctatcgaagccgggctcgaaccgctggctgacctgctgtggaacgaaccggcccacgatccggaagcggaggccgcaaaatatattgatgccgataagggcgtagccgacagcaaagcggccctggacggcgcgcgctatattctgatggagcggtttgccgaagacgccgcgctgctggcgaaggtccgtgactatctgtggaaaaacgcccacctggtctccaccgtcttcagcggtaaagaagaggaaggcgctaaattccgcgactacttcgatcaccatgaaccgatcgccaccgtgccgtcgcatcgcgcgctggcgatgttccgcggtcgcaacgaaggcgtcctgcagctctctttaaacgctgacccgcagtttgacgagccgccgaaagagagccacggcgagcaaattattatcgaccacctgggcctgcgcctgaataacgccccggcggacagctggcgtaaaggcgtcgtcagctggacctggcggatcaaagtcctgatgcatctcgaaaccgagctgatgggcaccgtgcgcgaacgcgcggaggacgaggcaatcaacgtcttcgcccgcaacctgcacgatctgctgatggccgcgcccgccgggctgcgcgccaccatgggactcgatccgggcctgcgcaccggggtgaaagtggccgtcgtcgacgccaccggtaaactggtcgctaccgataccatctatccccacaccggccaggccgccaaagcggccgtcgccgtcgccgcgctgtgtgagaagtacaacgttgagctggtggccatcggcaacggtaccgcctcgcgtgaaaccgagcgtttcttcctcgacgtgcagaagcagttcccaaaggtcaccgcccagaaggtgatcgtcagcgaagccggggcttccgtttactccgcctccgagctggcggcgcaggagttcccggacctcgacgtgtcgctgcgcggcgcggtctccatcgcccgccgtctgcaggatcccctggccgagctggtgaaaatcgacccgaaatccattggcgtcggccagtatcagcacgatgtcagccagacccagctggcgcgtaagctggacgcggtggtggaagactgtgtgaacgccgtcggcgttgacctgaacaccgcctccgttccgctgctgacccgcgtcgccggcctgacccgcatgatggcgcagaacatcgtcgcctggcgcgacgagaatggtcagttccagaaccgccagcagctgctgaaagtcagccgtctggggccgaaagcctttgaacagtgcgcgggcttcctgcgtatcaaccacggcgacaacccgctggatgcctccaccgttcacccggaagcttacccggtggtcgaacgtattctggccgccacccagcaggcgctaaaagatctgatgggcaatagcagtgcgctgcgccacctgaaggcagtggacttcaccgatgagaagtttggcgtcccgacggtcaccgacattatcaaagagctggaaaaaccgggccgcgatccgcgtccggagtttaagaccgcgaagttcgccgatggtgtggagaccatgaatgacctgctgccgggaatgattctggaaggtgccgtcaccaacgtcaccaacttcggcgcgtttgttgatatcggcgttcatcaggacggactggtacacatttcgtcgctttctgaccggtttgttgaggatccgcacaccgtggtgaaagcgggcgacatcgtcaaggtcaaagtgatggaagtcgatctgccgcgtaagcgtatcgccctgaccatgcgtctcgacgagcagccgggcgacagccacgcccgccgcggcggtggtcaggagcgcccgcagggtaaccgcccggccgcaaaagccgccaaaccccgcggtcgcgaggcgcagcctgccggcaacagcgcgatgatggatgccctcgccgcagcgatgggtaaaaaacgctaaactctccctgcccctttttcaggggcagttttttttcatgaccaggccatcgccatcacgcgcaaaacagcttcagttgtttctgataacctgcttttattccacgcctgaaaggcagcgaaattaatattttcatttcgttaacttcagaaaccttaattaaacattagatcgccgaaataatatttcgcgcatttttgattacaggctgactttgcggcatatcaataaaaaggtgattttcactttaaaaatagcctgcagcgcatcatatgtattgatgataaaaaccattctcattatcatcgattacagaacgttttttcttttttcgttggctacggtccccggcgcaactgcctccaggcgtccggaaaattcttcttcggttagcgatagacaagtaggccctatgcaattcacacctgatagtgcgtggaaaattaccggtttttctcgcgatattagcccagcataccgtcagaaactgctctccctcggcatgctgcccggttcctcttttcatgtggttcgcgtggcgccgctcggcgatcctgttcatattgaaacccgacgcgtcagtctggtattacgcaaaaaagatctcgccttaatcgaactggaagcggttgcacaataacggctggcccggcacaagagtctgaaatatgcaaaaattaaccgttggtttaattggtaatcctaattccggcaagaccaccttatttaatcagctgaccggcgctcgccagcgcgtgggcaactgggctggggtgaccgttgagcgtaaagaggggattttcgccaccactgaccaccaggtcacgctggtcgacctcccgggaacctactccctgaccaccatctcctcgcagacctcgctggacgagcagattgcctgccactacatcctgagcggcgacgccgacatgctgattaacgtggtcgatgcctccaacctcgagcgcaacctctatctgacgctgcagctgctcgagctggggatcccctgcgtcgtcgcgctgaacatgctggatatcgccgaaaagcagcaggtgcggatcgatatcgacgccctcgccgcccgtctcggttgcccggtcattccgctggtatcgactcgcggacgggggatcgaagcgctgaagatcgccctcgaccgtcatcaggcgaacagcgatcttgagctggtccactatccgcagccgctgctgcgcgaagctgacctgctggcgcagcagatgtcagcgcagatcccgacccggcagcggcgctggctgggtctgcagatgctggagggcgatatctacagccgggcctatgccggcgacgctgccgataaactggatatcgctctggcgaatctcagcgacgagatcgacgacccggcgctgcacatcgctgacgcgcgctatcagaccatcgccgccatttgcgacgccgtcagcaataccctgaccgccgaaccaagccgcttcaccgccgcgatggacaaagtgatcctcaaccgcttcctcgggttgccgatttttctctttgtcatgtacttgatgttcctgctggcgatcaacatcggcggcgcgctgcagccgattttcgatgccggctcggtcgcgatctttgtgcatggcattcaatggctgggttacaccctgcacttcccggactggctgaccgtgttcctcgcccaggggatcggcggcggtatcaacaccgtgctgccgctggtgccgcagatcggcatgatgtatctgtttctctccttccttgaggactccggctacatggcgcgcgccgcctttgtgatggatcgcctgatgcaagccctcggcctgccggggaaatccttcgtcccgctgattgtcggttttggctgcaacgtgccgtcggtgatgggcgcccgcacccttgacgcgccgcgcgagcgtctgatgaccattatgatggcgccgtttatgtcctgcggcgcgcggctggcgatcttcgccgtcttcgcggccgccttctttggtcagaacggcgcgctggcggtcttctcgctctatgtgctgggcattgtgatggccatcctcaccggcctgatgttgaagcacaccattatgcgcggcgaagcctcgccgttcgtgatggagctgccggtgtaccacgtcccgcatatcaagagcctgattatccagacctggcagcgcctgaaaggctttgtgctgcgcgccgggaaggtgatcgtcatcgtcagcatcttcctcagcgcgctgaacagcttctcactgagcggtaaggtcgtcgacaacatcaacgactccgcgctggcctcggtgagccgggtcattacgccggtgtttaaaccgatcggcgtgcatgaagataactggcaggccaccgtcggcctgtttaccggcgcgatggcgaaagaagtggtagtgggtacgctgaacaccctctataccgccgaagatatccagaatgaggaattcaatccgcagaccttcagtctcggcgaagaactgctcgccgccgtcgatgagacatggcagggactgaaagacaccttcagcctcagcgtcctggccaaccccatcgaagccagcaaaggcgatggcgaaatggccaccggcgccatgggggtgatgggcagtaaatttggcagcgcagcggcggcatacagctacctgatcttcgtcctgctctatattccctgcatctcggtgatgggcgccatcgcccgcgaatcaagccgcggctggatgaccttctccatcctgtgggggctgaatatcgcctattcgctctcgacgctctattaccagaccgttagctttagcgatcacccgcgctacagtctggtgtgtatcctggcggtagtgttgttcaacgtggtgctcttcggcctgttgcgccgggcgcgcagccgggtggacgtctcgctgctggccacgcgaaaaacgccggcctcctgctgttccagcccggctggcgattgccactaaggagggactgtggcgtcgttaatggaagtccgcgatatgctggccctgcagggccgcatggaggcgaaacagctcagtgctcgcctgcagacgcctcagccgctgattgacgccatgcttgagcgcatggaagccatgggtaaggtggtccggatcagcgaaacgagcgagggctgcctctccggcagctgtaaaagttgccctgaagggaaagcggcgtgccggcaggagtggtgggcgctgcgatgaaaggagtcaggccaggtcgcgcaacgaggtaaaacgagtaagacagctatgaaaaacgggccagcaggcccgttttcttatgactggattatttataaacgtcagcgttcgcgtgtacggttttttcgtttttctgcccggcaatcaccacaaagtatttcccacccagctcatcggcttttttcgacagatcgcgtcgggcgtccatcggcgacgtcgtcctggaggtcgtaatgctaccgaccttggtcagattcatcttcgccacgtcttctttttggatctctttcgcggcgaatgcgccgaaagagagggtgcctatcaccagagatgcaaccattcctgtaacaagtttcatagcctctactctccataaggttgttattgtaggtcacggtggcggattgaaataatcaaccaccgtaacaacctaagtattgctaggaatggcccttttaccatggcgcggcaaaaaaaattaccccagccgcgtcttcagcgccagcagcggctcgcagaaggccgcgggatgggaaacaaacggcgcatgcgcggccttatcgaagaggattgactcgctttccggccacaggtcatccagcaacgggacgatcttgcgcggcaccagtccatccagccggccatacagccgcagaaacggcatcggcagcctgaccagcgcctgacgcagatcgacggttctgaggatctccagtccgccattcagcgcctcggcggaaggcatcggcagcgagagcaccgcctgctttaacgcccgcgcatcctgacgcgcgctctctgtgcccatggtttgcagggcgaggaatcgctcgacggtgcgctggaaatcgtcgctcagctgctgctgaaatccggccagcacctcgggcttgatgccgggccagtcgtcacgagccgcgaaacaggggaagaggcaaccatcaccagcgcctgcacgcgttccggacgcataatcgcgacctggctggccaccagcccgcccaggctccagcccagccacaccgcctgtggaggggcctgctccagcacccgctgcgccatcgcctccagcgacatcgccccaaacccgccgctgcggccatagcccggcagatccaccaggtggagggtaaaatgcgaagccagctgcggcgtgatgcaatcccatacctgagcgttcagcccccagccgtgcagcagcacaagatgacaatctccttcgccgattgtttgccaccagatgtcgttcatccgttaccgttctctttttactggacagaaggccaaatatgctaacagcacacagcttatgctggctatgccaaatgccgctggcagtcgcccgctgggggatctgctcccgctgcagccgcgccctgctcgcctgtcccccgctctgcccgcagtgcggcctgccggcggcggcatcccgtcacccctgcggccgctgcctgcaaaagccgcctccctggcatcggctggtggcggtcaatgactatcgcccgccgctgagcggtctggtgcagcagctgaagtttcaccatcgcccggagctgggggccgccctcgcgcgtctgctgctgcagcgccttctgcagcgtgacgatttgccgccagtagacgctctggtcggcgtgccgctatggcatcgccgtcgctggcgccggggttataatcagtgcgacgaactgtgccgaccgttagcccgctggcgaggatgcgtctggcatcgcgaaggcctgactcgccagcgagcgggcgccgtccaacattcgctcaatgcccgccagcgcaggcagaacctgaaaaatgcctttcagcttgaatttgccgtgcagggactccatatcgctctggtggatgatgtcgtcacgaccggcagcaccgtcgccgagatatcccgcctgcttttgcgaaacggcgccgcgacggttcaggtatggtgtttgtgccgtaccttgtagacccccgctgatgggcgtattataacccagtaaaatagtcaactattaggccaacgctatgatccgtatttccgatgctgcacaagcgcactttgccaaactgctggcaaatcaggaagaagggacgcaaattcgcgtatttgtgattaatcccggcaccccaaacgctgagtgcggcgtatcctactgcccaccggatgcggtggaagacaccgacacggcgctgaaatttgaacagctgaccgcctatgtcgatgagctcagcgcgccctatctggaagacgctgaaattgatttcgtcactgaccagctcggctcgcagctgacgctgaaagcgccgaacgccaaaatgcgcaaagtctctgacgatgccccgctgatggagcgcgtcgagtacctgctgcagtcgcagattaacccgcagctggcaggccacggcggccgcgtatcgctgatggagatcaccgacgacggtctggctatcctgcagttcggcggcggatgcaacggctgctcgatggtcgacgtgaccctgaaagaaggtattgaaaaacagctgctgaacgagtttccggagctgaaaggggttcgcgatctgaccgagcaccagcgcggcgagcactcctactactaagcccttcccccggcggcaccctgccgccggtcctccctggccctttctgtgttaccgcgcaacatctcccgctaaatgaccggcaaaaaccggggaaagagtatgacttaagtctcatatttaacattttcccccgtcaggtgattctcaaccctcacatgttacccgtatcatccacttcaggcgccaccggcaaaaaaatagccagctatcctttctctgggtaaggataatgcaagcgtttacggtgccagactattttgctccctgacggagcggatgctctacaggttcgaactttgacgttacccataacaaattaaggccaggtaaatcatgccattagtcatcgttgctatcggggttgccctgttgttgctgttaatgatccgtttcaaaatgaacggcttcattgcgctggttctggtggcgctcgccgtcggattaatgcagggtatgccactggataaagtgatagtctccatcaaaaacggcgttggcggcacccttggcagcctcgcgctgatcatgggcttcggcgctatgctcggtaagctgctggcagactgcggcggcgcccagcgtatcgccaccacgcttatcaataagttcggtaagaagcatattcagtgggcggtggtcctgaccggcttcaccgttggcttcgccctgttctatgaagtgggcttcgtgctgatgctgccgctggtgttcaccatcgccgcctcggcccgtattccgttgctgtacgtcggcgtaccgatggcagccgcgctctccgtcacccacggcttcctgccgccgcatccgggtccgaccgcgatcgccaccatcttccatgccgatatgggcaaaacgctgctctacggcaccattctggctatcccgacggttatcctggcgggaccggtgtttgcgcgcttcctgaaagggatagataagccgatcccggaaggcctgcataacccgaaagtgttcactgaagaagagatgccaggctttggcgtcagcgtctggacctcgctggttccggtgatcctgatggcgatgcgcgccgtggctgagatgatcctgccgaaaggccacgccttcctgccaattgccgagttcttcggcgacccggtgatggccaccctgattgcggtactgattgccctgttcaccttcggtttgaaccgcggccgctccatggagcagatcaacgataccctgacctcttcgattaaaatcatcgccatgatgctgttgattatcggcggcggcggtgccttcaagcaggtgctggtggatagcggcatggataaatacatcgcctctatcatgcacgaatcgaacatgtctccgctgtttatggcgtggtctatcgccgcggtgctgcgtatcgcgctgggttcggcgaccgtggccgccatcaccgcgggcgggatcgccgcgccgctgatcgccaccaccggcgtcagcccggagctgatggttatcgccgttggctccggcagcgttatcttctcccacgtcaacgatccgggcttctggctgttcaaagagtactttaacctgaccatcggcgagaccatcaagtcctggtcggtgctggaaaccattatctcagtctgcggcctggtgggctgtctgctgctggggatggtggtgtaaggtcactcccgccacagaaaaaggccggtccgcgtgaagcgggccggccttttttatcggacatgctcttcgccgcgcagaggagcgcgcggcaggaagttatcaggaggcggctttcttgctcgcggccttgcgccgtttatccagatccttaatcagcttattgacccgttcatcggcaaacatctgctccagggtgacggacagcttccggcgccagttcgggtactcggtgctggtgcccggaatgttaaccggcgtcgccatctccagccagtcttccggctgcaggcccagcagggcgctgttgctgtcggcaatataacgctgcatcccccggttgaggatccccgtcatgctcatcagcgaggccttatggccggcgcgcttgggcagacagccgtacttatgcagcgcgtccagcagtccttgtttcgccagctcgcggtcctggtacagtccgcgcagcaccacctcatcaggatagaggcccagcgctttacctaacgtcagatcgccgctttcccagtagccgcggagagtgggcaggtcgtgcgtcgtcgccacagccattgattgctccgggtacagcgccggcgcgcggaacgttttctctgcatcactctcaaaatagagcaccttataagaatagacgccgctgttgcgtaacttgctgacgatctccaccggtaccgtgcccagatcttcaccgatcaccatgcagcgatgacgctggctttccagcgccagaagcgacagcagatcgtcgaccggatactgaacgtaagcgccatggtcggcggtttcaccatacgggatccaccacagacgcagcacagacatcacgtgatcgatgcgcaacgcgccgcagttctgcatattagcgcgcagcaggtcgataaacggctcataggcgcgggcggcaatgatatgcggatccatcggcggcaggccccagttctggcccagcgggcccagaatatccggcggcgcgcctacggatgctttcaggcagtacagttcacgatcgcaccaggtttccgacccgccctcggcgacgcccaccgccaggtcgcggtagaggccgatcggcatgccgtcacgctggctggtttcccagcaggcggcaaactgactccaggccagccactgcagccaaagatagaaactgacgtcatcctcatgctcaacgcagaaggctttcacttccgggctgtcgatatcctgaaaggccttcggccaggccggccagccccagcgcagcgggtcctgttgtacctgccaggcgtgcagcgcatcgaaagccgcctgccagtagaggctttccccttcgcgcagaacaaactcgcggaacgctgtcatctgctcatcttcacgacgagagaattgtttccacgccatacgcagcgcggtcattttcagcgtagtgacggcggtataatccacatcgtccgtttcccgcgccgcctgcagtgcctgctgcgttgccggagactgccaccacgcctgcgcctcttcgctacgctggaaatcttcaaccgcgttgacgtcgatataaataacgttcagccagcgacgtgaagacgggctataggggctggcgctctccgggttcgccggatagagggcatgaatcgggttaaggccaataaacgacccgccgcggcgggcgatttccggcagcatggcccgcagatcgccaaaatcgccgatcccccagtttttctctgagcgcagggtatacagctgcacgcaggtgccccacagctttttcccctctttcagcggctgcggctcatagcagcgcgctggcgcgacgatagttcggcagtgccagcgctccccctcctgggtgagggtcagggagtggtacccctccggcagtttggccggcagcggcagcgtctcgccgccgcgggttttcccttgatactgcttaccgtcctcagtagtcaggatccactgatactcaccgcgtcctgccaccggcagcgacatttttttgccgtgagtgaaaattttcacgttcggcagcgggttaaccgccactttcgtggcggcggtagagcgatgcatcgcatccagcaggcgctgtttggtgacagccgcgatagactgcggcttgccgtgcgcgttgatatagctggggctgatgcccgccgccagcgcggcattatcgaggcgtttactctccataggccttcctttagcgtttcgcctgccagatacgttgctgataatcgcggatcgagcggtcggagctgaacatgccgcagcgcgcggtgttgaggatagccgcgcgggtccaggcctcctcgtcgcgatacagctcatctacccgtttttgcgccgctacgtaggcttcgaaatcggccagcaccaggtacggatcgccgccctgcagcaggctgtgcagcatctgatcgaaggcatgcttgtcgccgttgctgtaggtgccgttctccagctccttaagcaccgcatcgagcagcttgtcttttttacgccatttcagcggatcgtagcctttcgctttcagggctttcacctcttcaaccgtgtggccgaagataaagatgttctcctcacccacctgctcagcgatttccacgttagcgccatccagcgtcccgacggtcagcgcgccgttcagcgccagcttcatgttgccggtgccagaggcttctttacccgcggtggagatctgctcggagatatccgccgccgggatcagtttttctgctgccgatacacaatagtccggcaggaagaccaccttcagcttatcgccgactttcgggtcgttgttgatcgcttccgctaccttattgatggcaaaaataatgtttttcgccagatagtagcccggcgccgctttcgcgccgaacaggaagacgcgcggtacgcggtcggactgcgggttttcgcggatctctttgtacagcgcaaggatatgcagcaggttaaggtgctgacgcttatactcgtgcagacgtttgatctggatatcgaagatcgcctgcgggttgatctcaatcccggtacgctgcttcacaaactcagccagatgaactttgttggcctgcttgatatcgcgataagtctgacggaacgccgcatcgtcagcatatttttccaggttgatcagctggtcgaggtcattggcccactcttttttcagcgtctcatccagcagcgaggccagcgccgggttgcactgcttgatccagcggcgcggcgtgatgccgttggtcacgttatggaatttgttcggccacagctggttatattccgggaacagatcttttaccaccagatccgagtgcagcgccgccacgccgttgacagcaaagccgcccaccacgcacatgttggccatccgaacctgtttgtcatgcaccaccgccagcttcgcccagacctgcttatcgcccggccaggttttgtccaccagctgtttaaagcggtcgttgatctctttaatgatctgcatatggcgcggcagcagcgcttttaccagcttctcatcccagcattccaacgcttccggcatcagggtgtggttggtgtaagcaaaggttttgctggtgatcgcccaggcgtcgtcccagctcagctggtgctcgtcgatcagcacgcgcagcagctccgggatggcgatggtcgggtgcgtatcgttcagctggatcacttcgtaatccgccagttcggccagcttgcggcctgccagatgatgacggcgcaggatatcggccactgagcaggcgcactggaagtactgctgcatcaggcgcagttttttaccggcctgatggttgtcgttcgggtacagcaccttggtcagtttttccgcgtcgatgccctgctgctcggcgcgcaggaaatcgccatcgttgaatttggtcaggttgaacggatgagcgtgtttggcctgccacagacgcagcggctgggcgacgttgttgcgatagccaagcaccggcaggtcccaggcttcgccggtaatgacgaacgccggctgccattcgccgtttttgctgactttcccgccgatacctacctggacatccagcgcttcgttatgacggaaccacgggtagctgctgcgcccccagtcgtcaggggcttccatctgctggccatcgtcaaatgactggcggaacaggccatactggtagttgagaccgtaaccggtcgccgactgccccaccgtcgccatggagtcgaggaagcaggctgccagacgtcccaggccaccgttacccagcgccgggtcagtctcttcttccagcagatcggtgaggttgacatcgtagcctttcagcgcgtcgctgacgccctcgtaccagcccaggttgagcaggttgttgccggtcagacgaccaatcagaaactccattgagatgtagttaacgtgacgctgtccttgcgccggtttcgctaccggctgcgccgccaggagttccgccaacgctccgctgactgcgcgccaccattgacgctgtgtcatctcggaagcggactgtaaaccaaaatgctgccactgacgcgtcagtgcagcctgaaactgagctttgttaaatgtagtctgtgacataatgagatccgggtcctttactaaaacgatggcgctagtgtgccgacctcccgattcatcgtcctcatcctgacggggattagacagggaggagtggcggggatgagcgaaaagtgtgatcctgaacactatagtgtgggcgagaaggcaaaaatatgctgtaaaaatcaccgcgatatgacaattgagaggttacctccggtagctaaaaatttgttacaggccaatacgcgtaaaaaatcttccagttcctcgccacgttattaacaaaataaatagaggcccctgaagaaataagcacctttcatcgcattgacccgcaaaaaagattacttctaagaaatcgctgacaataatttaataaaaacaaacaactactcttagcgtaaaataaatccacccacactccgccagctaccgcctgaaaaccgcggccgaccagtcctgcctgcgattttttcccattctcagccaatgtcaaaatttgtgacatagagcaaattcaagagcataaacttcggacataacttgcaataaatttcataatcaccgaccttattagatattaattacgaagcgcaaaaaaaatcgcaacctctctcttgcacagcgaaatgtagaactatgttgattccgtccaaattaagtcgtccggtccgccttgaacacactgtggttcgtgagcgcttactggcgaaactttccggcgcgaacaattatcgtctcgtgctgatcaccagtcctgccgggtacggtaagacaacgctcatttctcagtgggccgcgggtaaaaacgatcttgggtggttttcgctggacgaaggcgacaaccagcaggagcgttttgccagctatctgatcgcggcgattcagcaggctaccggcaaccactgcgcggccagtgaagcgatggtgcaaaaacgccagtacgccagtctctcctctctttttgcgcagctgtttattgaacttgccgactggcagcgcccgctgtatctcgtcattgatgattaccatctgatcaataatccggtgatccatgacgcgatgcgctttttcctgcgccatcagccggagaatatgaccctggtggtcctgtcgcgtaacctgccgcagctgggcattgccaatctgcgcgtccgcgatcagcttctggagattggcagtcagcagctggcctttacccaccaggaggcgaaacaatttttcgactgtcgtctgacatagcctatcgaagccgacgacagtagccggctgtgcgacgatgtcgccgggtgggccaccgcgctacaactcatcgccctctccgcccgccagaataactcctccgcccaacactccgcccgccgcctcgccgggattaacgccagccatctgtcggattatctggtggatgaagtgctggataacgttgacgcccgcacgcgcaactttttgctgaagagttctctgctgcgctcaatgaacgacgcgttaatcgtgcgcgtcaccggcgaagagaatggccagatgcagctggaggagatcgaacgccaggggctgttcctgcagcggatggatgattccggcgaatggttccgctatcacccgctgtttggcagcttcctgcgccagcgctgtcagtgggagctggcggttgaactaccggagatccaccgcgccgccgcggaaagctggatggcgcaaggtttccccagcgaggccatccaccatgcgctggcggccggcgatgccaaaatgctgcgcgatatcttgctcaatcatgcctggggcatgtttaaccatagcgagctggggctactggagcagtcgctggcggcgctgccatggtccaatctgctggaaaatccgcgcctgatcctgctccaggcctggctgatgcagagccagcatcgctacagcgaagtcaataccctgctggcgcgcgccgagcaggagatgagtgtggaaatggacaccgcgatgcatggcgacttcaacgcgctgcgcgcgcaggtggcgattaacgatggcgaccaggacgaggcggaacgtctgtcaatggtggccctggaagagctgccgctggccaactattacagccgcatcgtcgccacatcggtgcatggcgaagttctccattgtaagggaaagctgaccaaatccctcgccgtgatgcagcagaccgaacagatggcccgccgtcatgacgtatggcattacgccctgtggagcatcattcagcaaagcgaaatcctcttcgcccagggcttcctgcaggccgcctgggagagccaggagaaagccttccagctggtacgcgaacagcatcttgagcagttgccgatgcatgagttcctgctgcgcatccgttctcagctgctgtgggcatgggcgcgcctcgacgaggctgaagcttgcgcccgccaggggatggacgtgctatccacctatcagccgcagcagcagctgcagtgcctggcgctgatggtccagtgctcactggcgcgcggcgatctggataatgcccgcagccacctgaaccggctggaaaacctgctcggtaatggtcactatcacagcgactgggtctccaacgccgataaggtgcgagtgatctactggcagatgaccggtgataaaaccgcggcggccaactggctgcgccagacgccaaagccggagttcgccaacaaccacttcctgcagagccagtggcgcaacattgcccgggcgcagatcctgctgggcgacttcgaaccggcggaaatggtgctggaagagctgaacgaaaatgcgcgttcgctgcgtttgatgagcgatctcaaccgcaacctgctgctgctcaaccagctgtactggcagtcaggacgcaagagcgaagcgcagaaagccctgctggaagccctgacgctcgccaaccgcaccggttttatcaaccactttgtgattgaaggcgaggcgatggcccagcagctgcgccagctgatccagttgaacacgttgccggagctggagcagcatcgcgcccagcgtattctgcgcgacatcaaccagcatcatcgccacaaattcgcccactttgacgaagggttcgtcgagcgactgctgaatcatccggaggtgccggagcttatccgcaccagcccgctgacccagcgcgagtggcaggtgcttggcttaatctattccggttacagcaacgagcagattgccggcgagcttgacgtggcggccaccaccatcaagacccacattcgcaacctgtatcagaaactgggcgtcgcccaccggcaggacgcggtacagcatgcccagcagttgcttaagatgatgggatacggcgtctgacgacgccgttgccgtttagcacagctccagctgaaggttgttatcagtgatcaccttcagcacgccggccggcggcagcacgtcggtatagaccgcatcgaccatactgatgctgcccatgttgaccatcgcattgcggccaaacttggtatggtccaccaccagcatcacgtggcgtgaattctcaatgatcgcccgcttggtgcgcacttcatgataatcaaactccagcagcgagccatcgctgtctacgccgctgatgccgagaatgccgaagtcgaggcggaactgcgagataaagtcgagggtggcttccccgatgatcccgccgtcccggctacgcagttcgccgccggcgagaataatacggaagtcctctttcaccatcagcgtgttggcgacgttaaggttattggtcacaatccgcagatcgttgtgatcgagcagggcgtgcgccaccgcttccggcgtggtgccgatatcaataaacagcgtcgccccgtccgggatctcgctggccacccgccgggcgatacgctctttctccgccgtctgggtcgctttgcgatcgtgccaggaggtgttgaccgagctggagggcagcgccgcgccgccgtgatggcggaggatcattttctgttcggctaaatcgttcaggtcgcggcggatggtctgcgggcttaccgcgaactgctcaaccagctcttccgtgctgacgtaaccctgtttttttaccagctcgataatggcgtcatgacgttgtgtttgtttcatgaaatatccctggaaaaatgtcgcctacccgacccctgtcggtaagtctttatgcgcgttttcgcccatgtaaggtatcaacaaacgccatcgccaggccggtcgccagaccagccacgtgcgcgccgttggcgatcgccatgccgaaaacgtcaaaccagccagcaattaaccacactaaagagaagagtatcaacccgcgctgcagataaataccgctctgcggatcgcgctcgccccgcagccagacgtagcccatcagcgcgtagaccacgcccgacaagccaccaaaccacgggccgctaaactggtgctgcacgaagccgctcagcagagcgctgatgacggtgatcaccaccagcttgccgctgccgatgcgcttttccaccgcgccgccaagataccaccaccatagcaggttgaagagaatatgcatcagcgagaaatgcatgaaagcatggctgaaatagcgccaggcttcgaactgcagcgaaggatcgtagggccaggccagccaaatcatcaccggctgatcgcccagcagattttgcaggatgaacaccgcgatgcagatcagcagaatcgcccaggtgaacggaccggcgttatgccgcagcgtggcaaagaaaggaaagcgctgatagcgcaacccgctattggtctgtccggactgccagctcgccgccagatagcgcgggtccgccgggttttcgagaaaacgcgccagctcagccctgacgcgcccggcctgactctcatcagccagccagacgtcgctctgggtatgctgctggatggtcaggataatcccctgcgtcgccatataatcgacaaacgcctgggccacccgcgggttggcaaaagaggtaatcattaacatgcagcgaatcgcttattccacacaaagggggatagtatacctgccagtcgttaaaacgtcccgcgcgccacttccgccgggaaatggcgatgccaggcgtcgaacccgccgtcaacgctatagaccttatcaaacccctgctgcagcagatactgcgcggcgcccttgctgctgttgccgtgatagcacatcaccatcaccgccgtgtcaaagtcgttgtcacgcataaacgcgcccagcgtatcgttggtcagatgaaacgcgcccggcgtatgacccatcgcatagctttgcggatcgcggatatcgaccagtaccgccgtctgctgatgcagtttctggtgcgcttcttcaacattgatgcattcaaactgttccatgattctcttctctttctcgtcatgacgggcgatggccggcccaattttaccctgtagtgtaccgtcaggcggtaaagaaacgccaatatgttacacccatcacttcaaaatgtttttttgatgttaccaaaagcgcgtttgtttgctatagtgagcgatatcgagcatttatgagcttaaacgaaagtgtgagagggtaagaacgtggaaaccaaagatctgattgtgataggcggaggcatcaacggtgccggtatcgcggcagatgccgccgggcgtggtttatccgtactgatgctggaagcgcgcgatctcgcctgcgccacctccagcgccagttccaaactgatccacggcgggctacgctacctcgaacactatgagttccgtctggtcagcgaagcgctggccgagcgtgaagtgctgttaaaaatggccccgcatatcgccttcccgatgcgctttcgcctaccgcatcgcccgcatctgcgcccggcatggatgatccgtatcggcttgtttatgtacgatcatctgggcaaacgcaccagcctcccgggatccaccgggttgcgttttggcgcagaatcggtacttaaaccggaaattgtgcgcggtttcgaatattccgactgctgggtcgacgatgcccgcctggtgctggccaacgcgcagatggtcgtccgcaaaggcggcgaagtgcgtacccgcacccgcgctatctcggcgaaacgtgagaatggcctgtgggtggtggaagcggaagatattgatagcggtgagaagtttacctggaaggcgcgcggcctggtcaatgccaccggcccatgggtcaaacagttcttcgacgaagggatgcatctgcgctcgccttacggcatccgtctgatcaagggcagccacatcgtggtgccgcgggtgcatacccagaaacaggcttatattctgcagaacgaagataaacgcatagtatttgttattccgtggatggatgagttctctatcatcggcacgacggacgtcgagtataagggcgatccgaaagcggtggccattgatgataaagagatcaactatctgctgaacgtctataacgcgcactttaaaaagaccctcagccgggacgatatcgtctggacctactccggcgtccgtccgctgtgcgacgacgagtcggattcgccgcaggccattacccgcgactataccctggatattcacgatgagaacggtcaggcgccgctgctgtccgtcttcggcggcaagctgaccacctatcgcaaactggccgagcatgcactggaaaaactgaccccctattacaaagggatcggcccggcatggaccaaaaccgcggtgctccccggcggcgatatcggcggcgaccgcgacgactacgcggcaaaactgcgccgtcgcttcccgttcatcagtgaatcactggcccgccattatgcccgcacctacgggagcaacagcgagtggatcctgaaggaagccagcgccctgagcgatctcggggaagatttcggccacgagttttatgaagccgagctgaaatatctggtggagcacgagtgggtgcgcagcctggatgacgccatctggcgtcgtaccaaacagggcatgtggctgactgccgagcagcaggcgcgcatcagcgaatggctggcgcagcatgcgggaaagtctgaactgtcgttagcgtcctgacatcgcgcggcgccaggagagaaatacccgggctatggcttgcgcttggcccggatacctgttcacaaattaaacgagactttttttccagtcggcaatgtgacatttatactgagttctccccccaatgccgcaatgtagcgttttagggtcgaaagccgagggtcgttatcagcctgttccattttagcgatcgttggctgctttacccccatagccgcagccatctctgtttgcgacatttgcaactcttctcgaagcaagtttaaagcgacagactggcgtatctctgccgctttcgctgcaatacgctgctggctatcaggactctgtttcgccatgagttcttttagcgtggccattatcgctccttagtcaggtgttggctgaattctctgtcagccagagtaatcatctctttgtaaaaacgtttctcattcatgccatccttattgcccacacataaaacgatagctttccgcagaggatcaaaagcaaaacaggcgcggatggggagcccatgatgctgaacccgcagttctttcatattctgaaacgttgaatctttcaccgtatcaacatacgggcgcccaagctgcggagcaaactcagacaggatgagcatcgtggccaacatatcctcttttaaagctctactttgtaattcgaaccaggcatcaaacgtatccgtcgtttctacatcccacataggctatgaacgtaaacttattgagcatttatcgtactgctggcgaattcacgtcaatagtatattcccgcaatagcctgaatcctccccggcacttttccgaataaaacgttcgccacacaacacaacggggccaaatggccccgttgtgttgtgtggtgttgcattgactggcttacagccttaccgggtcgatatgccagatatatttcgcgtactcctggatcgtccggtcagaagagaagtagcccatgttggcaatattcaacattgccttataagcccactcttccgggttttgatacagctcgtcgacgcgatcctggcagtccacatagctacgatagtccgccagaacctggtagtggtcgccaaagttaatcagcgaatccagcaggtcgcggtagcgccccggttctgccgggctgaagacgccggtaccgatctgcgtcagcgcctggtggagctcttcatcctgctcgtaatattcgcgtggtttatagccgctgcgacgtagctcctccacctcttccgcggtgttaccgaagataaagatattctcttcgcccacgtgctcctgcatctccacgtttgccccatcaagggtgccgatagtcagcgcgccgttaagggcaaacttcatattactggtgccggaagcttcagtgcctgcgagggagatctgttccgacaggtctgccgccggaatgatcagctgcgccaggctaacgctgtagttggggataaagacgaccttcagcttgtcgccaatctgcggatcgttattaatcaccgccgccacatcgttgatcaggtgaataatgtgcttggccatatagtaggccgaggccgccttaccggcgaaaatattcacccgcggcacccactcggcctgcggatcggccttgatccggttatagcgggtgatgacgtgcagcacattcattagctggcgtttgtattcatggatacgtttgatctgcacatcaaacagcgccttcggattgaccaccacattgagctgttgggcaatatagctggccagccgctgtttgttctcaaacttggcctgacgcaccgcctgattgaccatcgggtagtcgatatgctgtttcagctcatcaagctgactcagatcggtccgccaggtgcggccgatatgctcatccagcactttcgacagcggcgggttggccagcgccagccagcggcgcggcgtcacaccgttggtcacgttgataaagcgcattgggaagattttggcgaattcggcaaacagtgactccaccatcagtcgggaatgcagctcggacaccccgttgaccttgtggctgaccactaccgccagccaggccatccgcacacggcggccgttagactcgtcgataatcgaggtgcggctgaggaggtcggtatcgttcggatactgctcctgcaaagtcttgaggaaatagtcgttaatctcgaagataatctgcagatggcgcggcagaattttacccagcatatccaccggccaggtctcgagcgcttcgctcatcagggtgtggttggtataggagaagacctgacaggtcacctcgaacgcctcgtcccagctgaacttatgttcgtcgataagcagacgcatcagctccggtatcgacagcaccgggtgggtgtcattcaggtgaatggcaatcttgtccgccaggttgtcataggttttatgcaacatgtaatggcgactcaggatatcctgcaccgtggccgacacgaggaaatactcctggcgcaggcgcagctcgcggccggagtaggtcgagtcgtccggatagagcacgcgggagacgttttcggagtggtttttatcctctaccgcggcgaagtagtcgccctggttgaatttaccgaggttaatttcgctactggcctgcgcgctccacagacgcagcgtgttggtggcgtcggtgtcaaagccggggatgatctggtcgtaggcttccgcaatgatctcctccgtctcaatccagcgggttttctttccttcctgctgaatgcggccgccgaagcgcactttatagcgggtgttgtggcgctcaaactcccacgggttaccgtactccagccagtagtcaggagactctttttgccggccatcgacaatattctgtttaaacatcccgtagtcgtagcggatgccgtaaccgcgtcccggcagacccagcgccgccagggagtcaaggaagcaagccgccaggcggcccagaccgccgttgccaagcccggggtcattctcttcatcgatcagctcttcgagatcgagccccatctccgccagcgcgctgctcacatcgtcataaatgcccagcgacagcagcgcattcgagagggtgcggccgatcagaaactccatcgacagatagtacacctggcgcacttcctgggagagctgcgcgcggttggagcgcagccagcgctccaccatgcgatcgcgaacggcaaacagcgtggcgttaagccattcatgcttgttggcgatggccggatctttaccgatgataaacatcagtttataggcaatagaatgctttaacgcctcaacgctcagcgtcggtgatgcatagctaaagggtacattcataacaatgactccagtggttacatcaagcgttgataaagttcgcgataggagttcgcggcaacctgccagctaaaatccatattcatcgcctgacgctgcacgtagcgccagagcgacgggcgcgaccagaggacaaaggcgcgacggatagcgcgcagcaatgacagcgcattgctgtcctcaaagacaaaccctgtcgccagaccatcggccagattctccagcgaactgtcagcgacggtgtccgccagaccgccggtgcggcgcaccagcggcagcgtcccgtacttcagaccatacagctgggtcaggccgcagggttcaaagcggctcgggaccagaatgacgtcggcgccgcccataatgcggtgggagaaggcctcatggtagccaatctgcacacccactttgcccgggtgttcggcggcggcggcgaggaaaccttcctgcagcaccggatcgccggcgcccagtagcgccagctggccgccctgctcaagcagacccggcagcgcttcaagcaccaggtccagccctttctggctggtaagacggctgacgacggcaaacaacggcgctttatcatcgaccttcaggcccatggcaatctgcagctgacgcttgttctccgccttctcctccagcgtgtcgcgatcgtagcgcatcggcagcagcagatcgttttgcgggctccagataccgtcgtcaacgccgttgagaattcccgacagccgaccttcatgatggcgctggcgcagcagcccctccatgccgtaggcgtactgcggctcggtgatctcgcgcgcgtaggtcgggctcaccgccgtaatatggtcggcgtagtagaggccggccttgagaaacgagatctgcccgttaaactcgaggccatgcatgttatagaacgaccacggcagctcaatgtcattcatatgccaggagtaaaacatcccctggtacgccaggttgtgcacggtaaacaccgatttagccgggcgtccgcgcgccgccaggtaggccggcgtcaggccggcgtgccagtcatgggcatgcaccacatccgggcgccagaacggatccagtccgctggccatttcacttcccacccagcccagcagcgcaaagcgcaggacgttgtcgggataagcgtgctggttggtatcgtggtaagggctccccggacggtcatagagatgcggggcgtctatcaagtagatccccacgccgttaaagtggccgtacagcagcgtgatccgcccggcgaaggtatcccggcgggtcaccacctgggcatccaccacgccgcgacggatatcgggaaacgccggcaacagcacgcgcgtatcgataccctccgcgatttgcgccgccggcagtgcgccgatgacgtccgccagaccgcccgtctttaacagcgggaacatctcagaacatacatgtaagacctgcattagcgctcctgtttgtgccctaatttccgcagcatgtcgcgggtcaccagcacgataccttcctctgagcgatagaagcggcgtgcatcctcttccgcattctcaccaatcaccattccttccgggataacacaggcgcggtcaatcacgcagcgacgcaggcggcatgagcgccccacccagacatctggcaacaagactgccgaatcaatgttacagaacgaattcacccgcacgcgcgggaacagcaccgactgcaccaccaccgacccggagataatgcaccccccggaaaccagcgagttcagggtcatgccgtggctaccggagcggtcctgcacgaacttcgccggcggcagcgattccatatgggtgcggatcggccagttctggtcgtacatatccagctccggcgtgactgacgccagatcgaggttagccttccagtaggcttccagcgtccccacgtcgcgccagtaaggttcggcgttcgggtcggactgcacgcaggagagcgggaaaggatgtgcataagccatgccagcttcggtgatcttcggaatgatgtctttaccgaaatcgtggctggagttctcgttgcgatcgtcttcttccagcagctcataaagataggcggcgtcaaagacataaatgcccatgctggccagcgatttggtcgggtcggtcggcatcgccggcgggttggcgggtttctcgacaaactcaatgattttttcgttttcgtcgaccgccatgacgccgaaggcggatgcctcttcaatgggcaccggcatgcaggccacggtgcaacgcgcccctttttcgacatggtcgatcagcatgcgcgagtagtcctgcttataaatatggtcgcccgcgaggatcaccacgtactcggccttgtagcggctgatgatatccaggttctgcgtcaccgcatccgccgtgccgcgataccaattttcgccatgcacgcgctgctgagccggcagcagatcgacaaactcgttcatctcttcgctgaagaacgaccagccgcgctggatgtgctgcaccagcgtgtgcgactgatactgggtaataacgccgatgcggcggatccctgagttaatgcagttagataatgcgaaatcgataatacggaacttgccgccaaagtgaacggcaggtttcgcacgcttaatggtgagatccttcagccgggtgccacgcccgcccgcgaggatcaacgccacggatttgatgggtaattgacgcgccagcatcagcggatcgtttttttcaagcctaaccatgattaactcctttttacacccccgctttccagctcatcccgccgcgccgccgccacgggtccaaccgaaagcttcagggcttacgacctttgaaatacgcacactccgtgcgcgggcccatgccagacagccatgatgaccggattatcctctccggcgaatggaggaacggcgcgccattccccctcgggtaaaaccatatcgaccacctctgcggtggcgttcagcgtgagcagccagcgatccgacaactggatctgcatacacgcggccccctgctgccactccgcggcagtcaggggctgggcgttgcgattaagccagcggacgttgccatccccctcctgccaccagcggttgcgggtgagcgccggaatacgacgccgcaggtggatcagcgccgcggtaaaggcggttaatcccgggttcgcctggcgccagtccagccacgtcagggcgttgtcctggcagtaagcattattgttaccgtgctggctgtggccctgttcatcgcccgccagcagcattggcgtcccctgagccagcagcagcgtcgtcagcagcgcatgcgcgctggcgcgccgccgttcaatcaccgcaaaattcgcttctaatccttctataccatgattgttgctgtagttattgttagtcccatcgcgattctcctccccgtttgcctcattgtgtttctgattgaaacaaacgcagtcgcgcagcgtgaagccatcgtgggccgtcaccaggttgaccgtcgccgatggcggcttgccatcgcgggcaaagagatcgctggaggccgcgaaacgttgggcaaaatcccccagggagacattttgctgtagccagaagcgtcgggcgctatcgcgaaaatggtcattccattcagcgaacagcggtgggaaattacccatctgatagccgcccgggccgatatcccagggttccgcaatcagtttcacctgcgacagcacgctgtcgcggcggatagcctcgaacagcggcgcatcctggcggaattccggcgtccgccccatcactgaggcgaggtcgaagcgaaagccgtcgacatggcactcatccacccaaaagcgcaaacactggcgcgcccactccaccacgccggggtggctaagattgagcgtattaccgcacccggtccagttgtgataatcgccatcctcccttacccaataatagctacggttgtcgattccgcgcagggagacggtgggcccgtcgagatcgatttccgcactatggttgagcacgatatccagaatcacttcgataccggcggcgtgcagcgccttaaccgcatcgcgaaactcatccagggcgcgatccgggtcgctggcgtagcgcggatccagcgcgaaccacgccaacgggttgtagccccagtagttgcttaaccccatccgctgcagtcgcggctcgctggcgaactgcgccaccggcaacagctcaagggcgctgatgcccagcgatttgaagtaagcgatcatcgccgggtggcccagcgctttataggttccgcgaatggcttccggtagctgcggattaagcaaggtgagccctttcacgtgcgcttcataaatcaccgtttccccccatggggtacgcggcggtttatcgccacgccagtcatagcgcagatccaccacctgcgattttggcgcgaccgcggcgctgtcgcggcgatcgggctgccacatgccgccgtgcaggcgctcatcgtcaggcagatcgccctcgacccggtgggcgctgggatcgatcaacagcttggccgggttaaagcggtgcccctgcgccgggtcccagggaccatgtacccgatagccgtagcgcaggcccggcccggcggcggccagccagccgtgccagatgtcgccgctgcgcgccgggagatcgaagcgttgctcgttgccctgctcgtcgaatacgcacagctccacccgctccgcatgggcggagaagagggcgaaattcacccccttgccgtcatagctggcgcccaatggcgcaggtttgcctgccgcgagtgaggtcattgcgcctcccggaccagccagatcgtcgccagcgggggcagggtcagcgacagcgaatgttcgcggccatggctggcgatagcgtcgctttccaccacgccgccattgccctgattgctgccgtgatagtgcatggagtcggtatttagcgcctcgcgccagcggcccggctggttaatgccgaagcggtagtcgtggcgcggcaccggcgtgaagttgctggcgacgataatctcgttgcccgcccggtcacggcgtacaaagacaaacaccgagcgctcatggtcgtcgaccaccagccattcgaagccgtaggggtcaaaatccagctcgtgcagcgctttatgatgccggtaggtatggttcaggtcgcgcaccagccgctggacgccgtggtgccagttgtcgccgccctccagcagatgccagtcgaggctaacgtcatggttccactcgcggccctgagcgaactcattgcccataaacagcagctttttccccgggaaggcgaacagccagccgtagtaggcgcgcaggttggcgaacttctgccaggcatcgcccggcatgcggtcgagaatcgattttttgccgtgcaccacttcatcgtgggagagcggcagcacaaaattctcggtgtagttgtagagcatgccgaaggtcattttgtcgtgatggtagcggcgatgcaccggatcgagcttcatgtaatccagggtgtcgtgcatccagccgaggttccatttgaaccagaaaccgaggccgccgccggctggcggacgggtcaccccggtaaaatcggtggactcttccgccatggtgaccgcgcccggagtctgttcgccaaggatgcggttggtgttgcgcagaaactcaatggcttccagattctcccgaccgccgtattcgttggggatccactctcccgccttgcggctataatcgcgatagatcatcgaggccaccgcgtcgacccgcagcgcatcgatgccgaagcgttcgatccagtacagcgcgttacccaccaggtagttgctgacttcccgacgtccgtagttgtagatcagggtattccagtcctggtgatacccctcgcgcggatcgctgtgctcatacagcgaagtgccgtcaaacgaggcaagggcaaaatcatccgccgggaagtggccgggcacccagtcaagaatgacgttcagcccggcggcgtgcgcggcattgataaagtaacggaaatcgtcgcgggtgccgaagcggcgggtcggcgcatagagcccggtgggttgatagccccagctgccgtcgaacgggtgctcgttaaccggcaatagttcgagatgggtgaagcccatccatttcgcatagggcaccagctggtcggccagctcgcggtagctcagccagaaattattatcggtatgacggcgccaggagccgagatgcacttcatagatagagatcggggcatcaaactggttcgccgctctacggtccgctggctgttccactttgggcggcagatcgcagataagcgaggcgctttccggacgcatttgcgactcaaaggcgtaagggtcggctttgacccgcagattgccgtgggcgtcaatcagttcgaatttatacagctggccattgtgcgcgccgggaacgaacagctcccagatcccggactctttgcgaaaccgcatcgggtggcgacggccatcccagtagttaaactgccccaccaccgatacgcggcgggcgttcggtgcccacaccgagaaacgggtaccggtgacgccgtccatggtggcagcgtgcgcgcccagcgtttcgtaagggcgcaggtgggtcccttccgacagcagccagacgtcaaggtcctgcaacagcggaccaaagcgataagggtcatcgatcagattctgctgcccgtgccaggtgacggccagctgatagcgaaaagcgtttttacgccgcggcaggacgccgctgaagaaaccacgcgagtcgagacattcgagcttgccgactttgcgtccggttttcggttcaataacccacacgtcggtggcatcgggtaataatgcgcgcacttccagcccggcgtcagtacggtgcatgccgagcacggaaaagggatccgcgaaatgaccggcgattagcgcattaatcacgtctctatcaatatgattagacatgctttcatcctgttgtaagtgtcgctcattcctgtaactggcgactttttttgacctgaacggcgcagtgctctcagcatcctcctgctccgtcccaccttcaggtaaggaattccttacttaaagcatagccaaggctgagttacctccgtggggaaaaatctaacatccgcgtttactccttgtattacgcaaaaaaaaagggggcctgaagaccccctttctgttcatcctgggcttacgccagctggcgaagcatccggcgcagcggctccgcggcgccccacagcagctggtcgccaacggtaaaggccgatagatactccggccccatattcagtttacgcaggcgtcctaccggggtggtcagggtgcccgtcaccgcggctggggtcagctcgcgcatggtaatctcacgatcgttcggtaccactttggcccacgggttgtgcgcggccagcagctcctcaacggtcgggatagaaacatctttcttcagcttgatagtaaacgcctggctgtggcagcgcagcgcgccaacgcgaacgcagaggccgtctaccgggataacggacgaggtggcgaggatcttgttggtctccgcctggcctttccactcttcgcggctctgaccgttatccagctgtttgtcgatccacgggatcaggctgcccgccagcggtacgccaaagttatcgaccggcagctcgccgctgcgggtcagcgacgtcactttgcgctcaatatccaggatggcggaagccgggtccgccagctccgcggccacatgattatgcagctgccccatctggctcagcagctcgcgcatatgacgcgcgccgccgccggaagccgcctggtacgtcgccacgctgacccactccaccagatcctgagcaaacaggccgccgagggacatcagcatcaggctgacggtgcagttgccgccgacaaaggttttcacgccgttgttcaggccggcggtgatcacatcctggttaaccgggtcgaggataatgatcgcatcgtccttcatgcgcagcgaagaagccgcgtcaatccagtaaccctgccagccgcttgcgcgcagcttcgggtaaatctcgttggtgtaatcgccgccctggcacgtgacaataatgtccagcgccttcagcgcgtccagatcgaacgcatcctgcagcgtgccaccggtgctaccgccgaatgacggtgctggctgtcccagctgggaggtagagaagaacaccgggcgaatggcgtcgaaatcgcgctcttcaaccatgcgttgcatgagaacagagccgaccattccgcgccagccgataaaaccaacatttttcataacgtattcctgcgaggtgtgtgctgtttgtgcctggccagtttccaactggattatccctcaccttacaaaatgcagctaaagtcgcaagtgaaattaatcaatgattgctgaacaatcagaaaagcaacttatcctgcacattgtccaccgtcgctggtcgtcgtcaaaagcgcaacgattatcggggaaatcccccggggaatggaatattttccgtcgctattttattgatcctgattatggattaagcgtgaaatctggtgcttttccgcttgccaaaaaaaagcgacaaacccagtcacagcaagggatgacgagggatacgagcatcgtcgtagcgctaataagggccaatagctggcaaggaaaagagggaaaaagggcggtttattgcaaagaagccagggtaagcagcgttaccctggctttttatttcccgcgagcgggagatgagcgggcttagctcagcagctggaaggcgatcataccgacaatcgccccggtggtgccaaggatggtttccatcatggtccaggtcttcagcgtctgggcttcactggcgccggtaaatttaccgaacagccagaagccggcgtcgttcacgtggcttaccacaatcgagccgccggcgatacagatagacaatgccgccatctgcgcgccgctgtagttcagctgctcaatcaccggcatcaccaggccgaccgccgtcaggcacgccacggtggcagagccctgaatgatacgcaccgccgccgccagtacgaagcaggtaatagcgatcggcagccccattccggtcagcgcttcaccaagcgccgggccaacgccggagtcaaccagcacctgcttgaagacgccgccagccccgatcaccagcagaataatcccggccggctgcagcgcgtggccgcaaatctccatcacccggtctttcgccattccctgacgtaccgccagaccgtaaatcgccaccaggcaggccaccaggatcgcggtgaacgggtggccgataaactcgaaccattcgtaggcagtggaacccaccggcacaaagcgcgcggcgatggttttcaggccaaccagcaccagcggcagcaggatcagcgccaggctgaagccgaaggagggcattttgccttcgccgagatgcggttccgtgacgtcgtcaggaatatgcaattcgacgtagcggctgatgaagttgccccatagtggaccggcgataatcatccccggaatggccgcgcacaggccaatcaggatcatccagccaaagtcggcgtgcatttgcgacgccagcagcatcggcgccggtccaggcaacagaaacgccgcggcggcggcaacgccggcaaacagcgggatcaccagcttcacgaggttagtaccggtatggcgcgccatcgagaaggcgacgctaatcagcagtacgatcgccacttcgaagaacagcggcagcgcgcagatgagaccggcgagaccaatcgcatagtgcgcgcgattgtggccaaaggatttgagcatcttgacggcaatctgatcgaccgcccccgtttcatgcaggatcttaccgaacatcgcgccgagcgcgacgacgatcgccaggaagcccagcgtaccgcccatccctttctccatcgtcgccgcgattttatccagcggcatgccggagaagagaccggcgccaatagaaaccaccatcaaagccacgaaggcgtgcattcgcgccttcatgactaaaaacagcagcagcaataccgagccgactgctgttaaaacaagcgttaaagtactcactagtgactgcctttgttgatcacctcgatggtgctggccaccacgccttccagcggctggtcgatatcgacgataagcacatcgctctcgtcggcgcctggttcctgcagcgtttcaaactgcgtcaccaacatttgggttttaaagaagtgccctttacgcgccttcagacggctttcgatcacgtcgaaatcgcctttcaggtagatgaaggagaggttcgggttgcccttgcgcagaatgtcgcgatagctcttcttcagcgccgagcagacgatcagcgacaccttgttggtacgctgcatggcgaacgcggcgtcatttagcgcctgcagccacggcgtgcggtcgtcatcgttgagcggctcgccggaggccatcttggtgatattgctgcgcggatggagaaagtcgccgtcaagaaacgcggcatgcagttgatgcgccacttcgctggcgacagcggattttccgctgccggaaacgcccatcaggacatagacgtggtgatcatggttagtcgtgctcaaagcgtcctcccactggactggtacgccgcgccggggctgactcatccagcgcgaaggcggcgtatcggttaattgttacgggtaactgttatcggtaacattgtcatgccggacctgtggagaagcaatatccattcgtgccagatgtgaatatgtgtgatctacttcaaacttgtcagtttaaattgatccgcccggtgacaatgtgaaacctaaatctaacatcttaggggtaatcgcttcaccacgaatgcgcgccagcagccgttcggcgccgatgcgccccattcgctcgcgcggggtcaggacgctggccagccgcggctccatcacctggccgatatcatggccgtggaacccggcgatcgccatatcatcggggatcttcagccccagacgctggcactcgaacgccgcgccgaccgcgaggtcatcgttggtgcagaaaatgccgtcgagctgtggatattcgcggcgcgcctggcgcatcagctcaatccccgaagaataggacgaggattgctccaccatcacgctgtagggcgtcatcccggcgtcaagcatcgcctgctcgtaccccttctgtttgatgatagtacgttcatcaagacgcgcccccagataggcgacatggcggtggccacgggcgatgatcgccgcggtcatctgccgggcggcttcaaagttatcaaacccgacggcaatatcgagacacggcgaccggctgtccatcagctccaccaccggaatgccggcgacttcgatcatcttcagggtgcgcggcgtatgggtgcgttcggtgaggatcaggccgtcaatgttccaggagagcatcgattcgaggcgtttctcttccatttccggcttatagccgtagtgcgccagcatggtttgatagccgaaggcgtcggtgacgctttcgataccgcgcagtacttccgaaaagacctgattggttaacgacggcagcagcacgccgatggcgcggctggtggcgttggaaagaatgtcaggggcgcgattgggaatataacccagttcatcgagggcaacggcaatcttgccacgcagcgcttcggagacctgctccgggttgcgtaaatagcgactgaccgtcattttggtcacgccgacaagatcggctacatcctgaagtacgggtcttttctttttcatcgtcctgactgtgatcaacggggaaacattttctcagtttatcacggacaaagcgcaaccttccctaacatgagggaaggctgcgcaatttatttaacctggctcagataactatcaaaccggcggcagatcgaacagcaggatctcgctatcgctgtcggcatgaaccgaaatcgcctgctcgtcccagatggccaaaccgtcgctggtggtggctttagtaccgttgatggtcacttcgcctttgaccacctggatccacacgcggcgttccgcggcaatctggtgaaccgactgctcatctttcagcagcgcccagcgatagagttccatatcctggtacaccttcagcgagccatctcgcgcatccggcgacagcaccagctgtttgccctgggcggcgtcgaagcggcgctgctcgtagcgcggggtaatgccggtttcttccggaataatccagatctgatacagacgcagacgatcggttttgctcgggttgtactcagagtggcgcaccccggtacccgcgctcatgatctggaactcgcccgccggcacctgctctttgttgcccatgctgtcctggtgctccaccgccccttccagcacataggtcaggatctccatgtctttgtgcgggtgggtaccgaagccctgaccggcgtcgatgacgtcgtcgttaatcacccgcagggcggagaagcccataaagttcgggtcataatagttggcgaaagagaaagtatgccaggaatccagccagccatggttagcgtggccacgttcgttcgctttgcgtaaatagatcatgttgcacccccgtatgttgtcgatggagtcagtgtggacccatttcgccggcgatcatagagggtgaaaattgactcctctgttcaaaaaatatgaacaagcgcagaggagccaatttgacttatcgggtaagggtaatggtggccggtgaaggctgctcaaagccgcgctgcaggatctccatattggtgagaacgtcagtttccttgacgtaattcggctggccgttgacgagggtgtcgtacagcgcgtcgtacacccgaccataatcgccgctctccagcggcaccgcttcgcgcaccatctcccctgcctcgttgacatacaccagctcgccaacgctgtcgtccgcgccaaatcccggctcgcccggcatgatattggccttcaggctggtctcctgctggtcaatgccgtacttcacaaacgaacctttgtgcccgtgaacgataaatttcgggtaatcgatctgcaccagatggctggtcttaacgatggccttcatatcgccgtagaacagctgggcttcaaaggtgtcatccgggttggctttattgcgcagcgagcgcagatcgtaagagacatggtccgggcggccgaacagcgaaatgatctgatccagggtatgcacgccaaggccatagaactcgccgttttgcggaccgccggggttggtctccgccagtgggcggtagttatcaaaatgactttcgatctccaccagttcgccgagtttcccgctctcaatcacctttttggtggtcaggaagcaggagtcgaaacggcggttctgatagggcgtcaccgtcagacctttgctgttcgccagggcaaacagagtttttgcttcctccagcgtcggggtgaacggcttttccaccagcacgttttttcctgcctccagcgcctttttcgcatattcaaaatggctgtcggcgtgagtgcagaccaccaccagcttgaccagtggatcgtttaatacttcatcaaggtcgctggtgaaatgaatatgggaatactgcggcgcctgctcctcgggcttcgcccggcggcggtaaatgtgcgctacctgccagcggtctttgcggtgcaaaacgtaaggaaggtgatagcgggtggtgcttttaccaaagccaataaatgcgcagtgcagagtcataacgctgtccttagttaatgagctaccttcaaccatagcgcaagccggtccctcacttcatcctctctgttcgcttgcagtgaagattcgttaggaaaatagttcgagtatcactcatacgtaattattaataacttattgattaataagtgattagatcaacagttttcggcaaaaaaccttgatcgccatggcaaaactgcggataagtggagagcaaaccaggaggttgctgatgactaacggagtagccagccgctgctgatggacaaacagtatctcgccataaacggcgccctttttttctggcttctcgcgctgatcgcctggtctgtcgatgcaagcgcgctggcgcgcctggcggccgcctgcgcgcttatcgctttcctcctccatagccaacggaacaagattaacgcgatgtttattaagaaaaataaaacggaacctcagatatcagaagcagccacgcctccggcaattaacccagaacccgaagcggtcgccagcaaaaaacacgagactacggtcatcgccagcggggtgcatttcgtcggcaatatagtcgccagcggccatgtctatatccacggtcaggtcaccggcaacattgaggccaaagagcatttgattaaggtaatgcgtgaaggccaggtggagggcaacgtcagctgccgggagctaataattgacggcaaggtgcagggccagtgtcatggcgacagcatcaccatcgaggagcacggccatctggagggtactctcgcctatcgcgcgctggcgatcaagaaaggcggcgtttttagcggtcgcgctgaaatgctggccgccgcggagaacaaaagtcatattctcggtctggtagcagacgcaccctccaaaaccgacgcggagcccgtcaggccgtagagcgcctgagatagcagcaaaaaaaaagccagcacccggctggctaaagtaatactggaagcaatgtgagcaatgtcgtgctttcaggctttccgcaagggtctccctgaatgcaggacaataataatcattctcattcgcacttgtctacttttttttgcaaaaaacaacattgactccccggccgccgtcagagattgtgaaggggaatcagtaaccaaaaagaggataagggaatgagtgacatagtgatacgccatgccgaaccgcgcgatgctgaacctttacatatgctgatggcgcacccggaggtctatcatgacacgctacagatcccctatccatcgatggaagcctggcaggagaagctacagcccagaccccatacctttcatctggtggcgacactggacgagcaggtcgccggacatctgtctctccatgttgagccgcgccctcggcgcagccacgtcgcaacctttggcatggcggttgccgccggccatcagggttgcggcatcggcagcgcgctgatgcgcgagatgatcgacctgtgcgacaactggctgcgcgtcgagcgtattgagctgacggtgttcgccgataatgccccggcgattgcggtgtataagaagtacggctttgagatcgaaggcaccggcaggcgttacgcgctgcgcaacggtgagtatgtggatgcgtattatatggcgagaatgaagtagcgtgttgccgggtggcggcttcgccttacccggcctgcgttcgcaccgttgtaggcccggtaagcgcagcagcgccaccgggcaacacatcaataccccgccgttaaatcatccggcgaacgcggatcggaggtgccatacagcatgccgtccggccccaccatgatgctctgggtactgcccatcgcctctttcagcgccactttctgccccttcgcctccagcagcttgagggtatccgggctaaagcctttctccacccgcagctcatccggcagccattgatggtggaaacgcggcgcgttggtggcttccgcgacgttcatcccgaaatcgatggtattgaccaccatctgcagtacggtggtgatgatccgactgccgcccgggctgccggtcaccagccaggttttgccatctttcaccacaatggtcggcgacattgacgacagcgggcgttttttcggctccaccgcattggcgtcgccgcccaccagaccatagacgttaggcacgccgggcttcgccgagaaatcatccatctggttattgagcagaatgccggaatcaccggccacaatgccggtaccgaaggtcgtattcagtgtataggtcaccgccaccgcattgccgtctttatcgaccaccgagaagtgggtggtctggttgctttcatagggcgccagcttgcccggacggatctggctggaaggcttcgccttgttgacatcaatctcggcggcgatcgctttggcgtaagccttgctggtcagcgcctgccacggcacgttgacgaagtcaggatcgccgagatattcggaacggtcggcataggcatgtttctccgcctccgccatcacctgcatggcgtcggcgctgccaaaaccatatttctgcatatcgaagttttcgaggatattgaggatctgcacgatatggatcccgccggaggacggcggcggcatagagtaaacctcatacccgcgatactcgccgctaaccggcgtacgctccacagccttatagccggcgagatcggctttggtgattagcccgccgtgctttttcatctcgtcagcgatctggtcggcgatggcccctttatagaaggcgtccgggccgtgctcggcaatcagctccaggctcttaccgaggttcttctgcaccagccgatcgccctttttcagcggctcgccgttcttccagaagatcgctttactattttcatgctgcgggatcacttcgctgccgtaggtcttcagatcgtccgccagcgcatcgttaacgataaacccctcttccgccagcttaatcgccggacggatcactttgttcaacggcatggtgccatacttttccagcgcgagggagaaaccggcgacgctgcctggcgtgccggaggccagatgcgaagtcagtgattttttactgtccgggttgccctggtcgtcaaggaacatgtcgcgggtggcctgctctggcgccatttcgcggaaatcgatcgccgtggtcttgccgtctttagtccgcagcatcataaaaccgccgccgccaatattcccggcctgcggatgggtgaccgccagcgcgtagcctaccgctaccgccgcatcgacagcgttaccgccctggcgcaggatatccacgccgacgcgggtcgccagcgcgtccaccgaggccaccatcccctgccgggcgcgtaccgggtggaacacatcttcctcgacgccataagagaccggcggcggcggtggcggattggcggcgacggtaaagctgccccccgccagcaacgcagcgatgaccacctgacgccatattgttgtttttatcattgtcttactcctgaaaggtaggtttcattccccgcttaagcctggttgataactcctaaaaaatcattgttatggcagattcgaggtacacttaagtgatcccacgcacgggaggagaaaaccatgaaagcgattctgtttctggcggtgctgatgccgcttggcgtattagcccagccgatcaatattaataacaaccctaaccagccgggttacgtggtccccagccagcagcgcatgcaaaatgagatgaaggtgcagcaacagcagcagcaaagcatgctgaagcaggatctgaacaatcagacccgctcgcagcagcagcatttgcaaaaccagctgcagactaatcagcagcgtgcggcccagggcggcaatctgaatgcgccgcagcaggtgcggccaaataacaacggtgggatgctgcggcagactaatccgtaaaggtcgtccgccgcaaatccgtcttaaggctggaaattcggcccgatgacatcaatggcatcggtgcagatgcagtctacgccccagcgcagcagttcggcggcgcgctggggtttattgaccgtgtacaccagaatgtgcaggccggcctgtttcaggctcgccacccgcgccgcatccagcagtttgtgattgaggtgaatcgacacgcagcccaaccgggtggtcaattcgcgccagtcatcgcgccactcatccagcagcagcccgcgcggcagctcgggcgcggcttcctgcgccgcctccagggcgtcgatttcaaaagaggagagcagcggcgcggtcatgccttgccatagatcgcgcgcggccagcgccaccactttcccggtctgcggccccagcccggtggtcggcttaatttcgatattcgccatcatgtcgtgacgacggcagcgctccgccacctgggagagcagcggcagcggctcgcccttaaattcacggctgaaccagctaccggcatcgaccttcagcagatcgtcccacgccagctcgcccgctacgccccagccattgctggtgcgttcgagattatcgtcatgcagcagaaagatctgcccgtccttcgacagcttggcgtcaaattcaatcatcgtgtgcccgtagcgggcgccgacgtcgatagccgccagggtgttctccggcgccagtttaccgccgccgcgatgggcgacgatgcggggataaggccagttactcatgcgcgttttcctgtttcaccatcaaagaggtgcagatgttccaaaggcagatgcagccatagcgtgctgcctgccgccgggcgctgctgatgcggcagtctgaccaccagcttctgttcgccccagcgcccgtgagcgaggttatcggcacctaaaatttccagggtgtccatcagcagcggaataccaccttgcgcctgcgagcttaagataaaatgctccggacggataccgagcgtcattttacgcccagcgtggcgccggtgctcatgattcgtcggcagctgcatgccgcccgccagctcaaagcgaccgccgtcatcgctgatgcgcccttccagcaggttcatggccgggctgccgataaagctcgccacaaagcggctggctggcttctcatacacttccaccggggtgccgatctgctcggcaacgcctttgttcatcaccatcacccgctgggcgagggtcatcgcctccacctggtcatgggtgacgtacagcgaggtggttttcaggcggcgatgcagctgctgcagttccagacgcatctgcacgcgcagcttggcgtcgaggtttgacaacggttcgtcgaacaggaataccgccggatcacgcacgatggcgcggcccatcgccacgcgctggcgctggccgccggacagttcccgcgggcggcgcttgagcagaccatccagctcaagaatgcgcgccgcctcctgcacccgctcggcgatcaatcccttacccatgccgcgaatcttcagcccccacgccatgttctcttccacgctcatatgcggataaagggcatagttctggaacaccatcgcgatgccgcgatccttcggctccatctcggtcacccgtttacgatcgatccagatatcgccgctggtcacccgttccagtcccgcgaccatccgcagcagcgttgatttcccgcagcccgacgggccgaccatgacgataaattctccgtccgccacgtccagcgtcagcggttgaattacctgggttttgccatcccagcttttgcttactgcctgtagttttaaaccagccattttatttctcactatcgaccaggccgcgcacaaacgcgcgctgcatggctaaaacgatgacgaccggcgggatcagggtcagcagcatcgccgccatcacctgattccactgggtagtaccttcgccggtggcgatcatgcctttaataccggcgacggcggtgccaagattcacatcctgaataatcagcaacggccatagatactggttccagccgtagataaaggtgatgacgaacagcgcggcgaggttggttttcgacagcggcagcacgatgtcgcgaaagaagcgcatcggcgaagcgccatcgatacgcgccgcttcaatcagctcgtccggcagggtcataaagaactggcggaacaggaaggtagcggtggccgaagccatcaacggcagcgttaacccggcatagctgtcgagcatgttgaggttggcgatcacctccaccgtcgggaaaatacgcacctcgaccggcagcatcagggtgataaagatcatccagaagaacaggttacgcagcggaaagcggaaccagacgatagcgaacgccgaaagcatcgacaccacgattttgccgaccgtaatggcgaacgccatgatgaagctgttgagcatcatcagccagaacggcgcgctgttgacgccgacgccgttcatccaaatggtcttcatgttctccagcagatggccaccggggatcagcgtcatcggcgtttcaaataccgatttgttatccagcgtcgccgccacgaaggcgacgtacagcgggaataaaatgacggcgatacccaggatcagcatggtgtggctgaaaatcgtcagcccgcgacggttctcaatcattggtaacgcaccttactttcaacgtaacggaactgcaccaccgtcaggataatgacgaggaacatcagcaccaccgactgcgcggcggaagcggatagatcgagcccggcgaaaccttcgcgatagattttgtagatcagagtggtggtcgcctgcaccgggccgccggcggtggcggcatcgatcaccgggaaggtgtcgaagaaggcataaaccaggttgaccaccagcaggaagaaactcaccggcgcaatcagcggcagcgccagcttaaagaagcgacgaatcggcccggcgccgtcgatggcggcggcctcaaccagcgaacgcggaatcgactgcagcgcggcgaaaaagaacaggaagttgtagcttatctgtttccacaccgaggcgaagaccaccagaaacatcgcctggccgctgttctgcgcatggttccagtcgtagcccagctcgccgaggaaatgggtgatcagcccgcgcccggggttaaagaggaagatccacagcaccgccgcgacggcgggggccacggcgtacggcagcagcatcagcgtttgataaaagcggctgccgcgcaccacatagtcgaccagcgcggcgaaaaacagtgaaatgagcaggccgctgacggtcaccagggcgctgaattttatggtggtccagaacgagtccaggtagtacggatcgtggaacagcgcaacaaagttatccaggccgacgaactggctggaaaggccaaagggatcgacgctctgcagcgagtaccacagcgcttcgcctgcgggccagataaagaaaatcaacgtgataatcagctgcggcgcgaccagcacatagggcagccagcgcgagcggaataccggacgggatgatgacattgagattgggttcctgaacaatgccgggtggcggctacgccttacccggcctacatagggcacatcgtaggcccggtaagcgcagcgccaccgggcaagttacagattacgatttggtcgcttgctcgaagcgacgcagcagctggttcccgcgctgcacggcggaatccagcgcctgctgcggggttttcttgccggtccacacgctctccagctcttcatcgacgatggtgcggatttgcggcatgttgcccaggcgcagacctttggtgaacggcaacggcggcttgttcagcatctggcgggtagcgatatcggcgcccgggttcttatcatagaagccctgctgacgcgtcagatcgtaggccgcggtagtgatcggcaggtagccggttttctggtgccactcggcggcgttttccggtttggtcaggaagtcgaggaacttcgccacgccggtgtaggtctctttgtctttgccctgcatcacccacaggctggccccgccgatgatggcgttctgcggcgcgcctttcacgtcggcatcgtaaggcatcatgccgacgccgtagttaaatttggcgtactggcggatatcggccagcgatccggacgaggcagtggtaatggcgcagtcgccgttatagaacttttcggtagactcgtctttacgcccgaagtagctgaaatcgcccttcttgttcatctcttcgagcagcgcgatatgcttcacctgctccggcttgttgaactcaagaaccgcgtcggtaccgtcgaagccgttattcttcgtggccaccggcagaccgtgccaggcgctgaagttttcaatctggatccagccctgccagccgctggcgtagccgcacttcatcccggcggctttcagcttcgcggtgtaggccgccagatcctgccaggtcttcggcggctgatccggatctaagccggcttttttgaaggcgtctttgttgtagtagagcaccggggtagagctgttaaacggctgggagagcagatggccggttttcgaatcggtgtaatacccggccaccgtcggtacgaactgcgattcatcaaacttgatgcccgcctcgctaaacacctggtagaccggcttaatggcttttgacgccatcatggtggcggtgccgacttcatacacctgcaggatagccggcgcgttgccggtacggaaggcggcaataccggcgctcaggctctgctcgtagttgcctttgtataccggaacgattttgtaatcaggattggccgcgttaaagcgttgcgccagagaatccacttctttacccagctcgccttccattgagtgccagaacgggatggtggtaaccgccagggcctgaccggcaaaagccaggctcagcgccagtcctaaagctgtatgtcgtaacgatatcatcggttatctctcttgttgtgccggatgcgcgatttcacgcgttttatgctcgcggggtaacatgacatgttcgaattacagaaaaataacttttttattacaaaaaaaagatagtaacgggtcagagagatgacaagccgatgaaaggacgggggaagtaaagtgggagctgagacacggataatattcgtgcggtcggctcccggggtcggcgcaagcgcctcgcccgggctacaaaccggcgaagccgccgggttgcaacgagttaaccgtcatccgcgcaagcgcgcgacaatctgttccagggtaagttgccctgctgccgcctcgacggtcatgccgacgaagtctggattcgccggcaatataattccatttcgctttaaaaaaagcagagtgataaacagtgccgtacgcttattaccatcattaaatatatgaccgcgagaaatcgccagcagatgcatcgcagcgagtcgccacacgtctgtcacaccttcatattcaattttgtttagcaccctatacattatcgcttcggcacgccctggatcgggcataccggcaacgccaggcgtgacgcggagcagcctgtcgtgaaactgtattatctcttccgctgagataatctgcagcgtcatttatccgcaagctccctgatctcatcaccatgaaccgccatgatagccgcgaactcatcatccattctggccgtctggtagcgttcaaactcttctgcactaatgatgactgcagatttatgcccacgacgggtaatggtcacaggtacacctgtcactgcgctttccagcacatcggccagattttgccgggcttcgctatagttaaccgttctcataaaaacctccaaagctgtactcttttattgtacaacatatatgtacaaaaaaagagccaacaggctcttttaaatgtattcgtgcgatcggctcccggggtcggcgcaagcgcctcgcccgggctacaaaccggcgaaatgaacgacgccgggttgcgatgaattaaccgccaagataggcgctgcgcaccgcctcgttggccaacagcgcgtcgccggtgtcctccagcaccacgtggccgttctccagcacatagccgcggtcggccagcttcagcgcctggttggcgttctgctcaaccaggaagatcgtcattccctgctcgcgcagctgctcgatggtgtcgaaaatctgctgaatgataatcggcgccagccccagcgacggttcatccagcagcagcaggcgcggttggctcatcagggcgcgaccgatcgccagcatctgctgctcgccgccggacatggtgccggcgcgctgaatacggcgttcatgcagacgcgggaacagctcatacacccatttgatgcgggtctggaactgatcgcggtcggcaaaaaaaccgcccatcgccaggttctcttccaccgtcatacgcgaaaagacgcgccgcccttccggaacgatcgccaccgcctcgcgcatgatcttcgcggtttgccagtcggtaatatccttaccgtcaaagacaatgcgcccgctggaggcgcgcgggtcgccgcacagcgtgccgaggagggtggttttccccgcgccgttggcgccgataagcgtgacgatctcgccctgtttgatatgcaggctgacgttgtgcagcgcctgaatcttgccgtagtgggcgctgacgttgtcaaaagttaacatcgcgttttccatcttatgcctcaccaaggtatgcgcggatcacgtccgggttattacgaatctcttccggcgtcccgttggccagcggtgttccctggttcacgacgtagatgcgatcggaaatgcccatcaccagcttcatatcgtgttcgataagcaggatggtggtgttgtgatggttacgcagctcggcgataagctcgtccagctctttggtctctttcgggttcagccccgccgccggttcatcgagcatcagaatttccggctgggtcaccatgcagcgggcaatctccagccgacgctggtcgccgtaggccaggttgctggcctgacggttggcatgctccagcaggccgatacgctccagccaggtggcggccctgtccagcgcttcgctctgcgcccgacggaaggccggcgttttcagcaggccggagaagagcccggttttcagctgctgatgctgcgccaccagcaggttttcaatcaccgtcatttcgcggaacaagcgcacgtgctggaaggtccgcaccacgcccatccgcgcaatctgctgacccggcagcccttccaggtgctggtcgcgcagcagaatagtgccgccggtgggcttgtaaaaaccggtcaggcagttaaagacggtggtcttcccggcgccgttggggccgatcagcgagacgatctcgcgctctctgagctccagcgacacattgttgacggccagcagaccgccgaaacgcatcatcaggccgctaacggataataatggctgactcatgcctgctctcctttcgcctgaccgtttttcagcttcaactgcacgcgcgtcattggcagaagcccctgcggacgccagatcatcatcagcaccatcaggccgccgagcattaacatgctgtattcgttgaagtcacgcatcaactcgcgcgagaccaccagcagaatagccgcgaggatcaccgcgaactgcgagcccatcccgcccagcacgacgatcgccagcacaaaggctgactcggcgaaggtaaaggattccgggctgacgaagccctggcgcgcggcgaacagcgtgccggcgaagccagcaaacgcggcgctgatggtaaaggcggtcagcttgatgcgcgtcgggctcaggcccagcgaacgacaggcgatctcatcttcacgcagcgcttcccacgcccggcccagcggcattcgcagcaggcggttgatgacgaacaggctgagcactaccagcagcaacgccaccaggtagaggaaaatcacccggtcggagggatcgtatttgacgccgaagaagttgctgaaggtatcccagccgccttcgcgggcgctgcggctaaattcgaggccaaagaaggtcggtttcgggatctggctgatgccgttcggcccgccggtgatctcggtattgttgagcagcagaatgcgcacgatctcgccgaagcctaaggtcacaatcgccaggtagtcgccgcgcaaacgcagcaccgggaagcccagcaggaaaccggccgccgcggagaccaggccggccagcgggagacaggtccagaagccaagaccgtaatagtggttcagcagcgcaaaggtatacgcgccgatggcatagaacccaccgtagcccagcaccagcaggccggaaaggccgaccaccacgttcaacccgaggccgaggatgatatagatcatcgtcagggtggcgatatccaccgtgccgcgcgacaccataaacggccaggccacggcaatcaccagcagggcgatcaggaacagcttctgcttcaccgtcgacccgtcaatcgccggcataataaacttcggcccggagacgttcttaaccgctttctggaacagcggccgcagcagctggaagaaaaagaccaccgcggtaccgatgaagatccactgccagcgaatatcggcggcggtatcgaccaccagtttggtgccgttcagctccagctgcacgcccataaagacgcccgccagaatgaagaacatcacggcagagagcagcgccattgcaattcgcatcggtttcatactttttccacctccgggcggcccagaatgccggtcggcatcactaacagcaccagaatcagcagcgcgaaggaaacgacgtccttatattcggtgctgagataggcggaagagagcgcctcggcaatacccaggatcaggccgccgatcatcgcgccagggatactgccgatcccgccgagcacggcggcggtgaacgccttcatcccggccataaagccgatgtaggggttaatcacgccgtagaactgccccagcagcacgccggccaccgccgccatcgctgcgccgatgacaaaggtcagggcaatgacgcggtcggtgttaatcccgagcaggctggccattttcagatcttccgcgcaggcgcggcaggcgcgccccatccgcgagtagcgaataaacagcgtcagggccagcatggcgataaaggtcaccacccagatcaccagttgcatggtggtgattgtcgcggagaagctgtcgctgtggccgacgacccactggccgttaaacaagctcggcagcgccacgtcgcgggagccctgggtcaggctgacgtagttctgcaggaagatagacatcccgatggcggagatcagcgcaatcaggcgcttggagttacgcaccggccgataggccacgcgctcaatgctccagccgtaggcgctggcaatcacaatggcgcccacgaatccggcggcgaccagcagccagctagtgtcaatgcccatcatcatcagcgcggcgatgatcatgaaggagacatagctgccaatcatatagacctcgccgtgggcgaagttgatcatgccgataatgccgtacaccatcgtatagccgatggcgatcaacgcataggtactgcccagcgtgacgccgttaaacatctgctgcagaaaatagagaaactgctcggacataaggtaacctttttcaaaccgcccgcggttcgcaggcggagggataactcgtcttcagcgcttatttcgccgcgctcgaagagccgtcggcgtgccactggaagacaccaaactcaaatcccttcagatcgcctttttcatcccaggtcagcggcccaatcacggttttcgccccgtgcgctttcaaatctttgattaaatccagcggctgctggctgccggttctgtccatcgcctgcgccagcgactgaacggcggcataggtgatccagacgtacggtccgctcggatctttcttctccgctttcagcgcgttgacgatggcgctgttggcagggtcctgatcgtagcgttttggcattgtcaccagcatgccttccgccgcggcgcccgcgatattggacagcgaggcgttgccgaccccttccggccccataaacacggttttcaacccgacggagcgcgcctggcgcagcatctggcccatttccgggtagtagccgccgtagtagacgaagtcgatgttctctttcttcaggcgcgccagcagggcggagaaatctttttcccccgcggtgatgccatcgaagaagacgatgttggccccggctttcttcaggttgtcctgcaccgaacgcgccagcccttcgccgtactgctgcttgtcatgaatgatggcgatacgctgcggtttgactttctcgacgatatatttcgccgcggtcggcccctgcgaggagtcgaggccggcggtacgcatgatgtactggtatccgcgctgggtcagctccggattggtcgccccgggggagatcatcaggatgccttcatcctcatagatgtcggaagccggctgagtggaagaggagcacaggtggccgataacgtactgaatgccgtcgttgacgattttgttggccaccgcgaccgcttgcttcggatcgcaggcgtcgtcatattcgacggccaccagcttgtcgcccttaatgccgccgctggcgttgatgtctttaatcgcctgacgcgcgccattgaactccatgtcgccccactgggccaccggccccgacatcgcgccgaccacggcgaccttaatatccttggccatcgccgcgtgcgacatcgctaatgcgacaatgcccgcgacgatggttttcgcgttccttttcatgctgcagaaccccgttcgtgatgtggtgtaaatgttttgtatttttatggttaaaaagcattctgtgcttttattaaacaacgccatttttaccattgagtttaatggtttagcgcagtttttcactaaaaaacagattaaaacctctatttttcagtcgattaagcaaagataatattctgtattttggtgaagataaacaaaaaaaagtccatcctgcagcataaaataacgatacataaggcggaataaaacgctgcacattaggttaaaattctgcttatttttcgatccatgacggattgcgctaccctgacaacgccaggaaaacgaatcccctgatgtacgcgcaaaaaacagcgctccgccagacagcaattttgggtacactggcgcctctgttttgcactggatttgccgcccatgaaactgaccattatccgtttacagcacttcagcgatcaggatcgcattgatctggggaaaatctggccgtcgcaggatctgtcgacgctgacccttgatgaaaaccatcgtctctacgccgcccgctttaacgagcgcctgctgggcgccgtgcgcgttaccctgcgcggcgtcgaaggtgagcttagcgatctgtgcgtgcgtgaagtgacccgccgccgcggcgtcgggcaatacttagtggaagagacgttgcgtgataacccggcgatcaatagctggcgcgtcgccgaccacggggtggaggaccgcggcgtgatggcggcctttatgcaggcgctcggctttagcgcccagcagaatggttgggaaaagcattaagccgtagccccaataagcggagcatgaccaaggaagaacccggcggcgcttcgcttagccgggctacctggcgactctagccccggtaagcgcagcgcgaccggggtcagacaacgcatttgcagtgggaaaggcgccccccatttaacccagcatttcgcgttgtaaaaaggcgtcaagacccgaaatccccgggagcttacatcagtaagtgaccggggttgagggccgcagacaacgcatttgcagtgggaaaggcgccccccatttaacccagcatttcgcgttgcaaaaaggcgtcaagacccgaaatccccgggagcttacatcagtaagtgaccggggttgagggccgcagacaacgcatttgcagcgtgaaaggcgccggttaaattatttggcgtcggtcgccgtaccgttcgcatgccaggtaaagaccccgaactcaaagcctttcaggtcgcctttctgatcccacgacagcgggcccatcacggtgtctactgtcgcgcctttcaggtatttagcgatttccgccggatcgtcagactgattcaggcctgcctgcagcgactgcagcgccgcgtaggtggtccacacgaaggcgccgctcggatcctgtttcttcgccttgatcgcatccacgatcggtttgttcgccggcacctggtcgtagttcttcggcttggttaccagcaggccttccgccgactcgccggcgatgttagacagggagacgttcgctacgccttccgggcccataaactgggttttcagaccggcggcgcgcgcctgacgcaggatctggcccatttccgggtgatagccgccgtagtagacgaaatcgatattctctttcttcaggcgcgccaccagggtggagaaatctttctcaccggcggtgatcccgtcgaagaagaccacgttcgccccgccttttttcaggccatcctgcaccgcacgggccaaaccttcgccgtactgctgtttgtcatgtaccactgcgatacgctgcggcttcactttgtcgagaatgtatttcgccgcggttggcccctgatcggagtccagaccggtggtgcgcaggatcagtttatagccgcgcgccgtcagctccggagcagtcgctgccggggtaatcatcagaatgccttcgtcttcatagatatcagacgccggctgagtggaagaggaacacaggtgaccaatgacgtatttgatgccgtcgttgaccactttgttggctaccgctaccgcctgtttcgggtcgcaagcgtcatcatatttgacgatctgcagcttattgcccttgatgccgcccttagcgttgatatccgctaccgcctgctctgcgccggtaaactcctggtcgccgtactgggccaccgggccggacatcgccccgactaccgcgattttgatatcttccgccagcgccgcgctgctcataactaaggcaatacatcctgccagtaacgctttacccttcatattcatcctgaggctccccattattatggtttttgcatttgttgtgatgttgtttattagcgcattattttgtttataccgataggaaaagcatatgatagctaatcaaccgggggctgcccgcgcttttgcagcacactatgctaaacataccgtcattctgaggaatttgaaacgactaaattgcgggctatgtaacagataagtgacaaataaaaaaaccgcgccagcatgaaccggacgcggtgcaaaacagagcctgattaccagcctgcgggtaggtagcccaccgcggatgctatcgcgtaggcggcgctgcaaagatacaacaacacaatgaagcattggataagcggatgggtcatccaggccggacaggtccagcccggggtcagatcgccacgctggcgggcgcccttgagcatcaggatcggcataatcgataaaatgacgccgctgaacaccccggcaaaatagagcgcgttgacgaaggagaccatgccgctataggccagtacgaacggcgggatcgccaccaccagcagcaccatcaggcgccgggcgggctgttcgtcattccccaggcggaactgatcgaagatattggtcaggaagctgccgcccagtccccagtaggaggtcagcatcgcgcacagcgcaaacagattggctgagaagaaggcccattcgccaagcgcccgcccccaggagatggtggccacatccgagatattgtcgagaccgttaagcgagatcaccgacaacggcaccagcgccagcagggtaaaggtcagcgccataccgaccatgatggctttaggcaatttttccggtttgtcggcgaagccccgcgccatctccggcacgatatactgtgccgagaagcagaatgccacgacgttgaagaccggaaccatatacagccagttgccgtcgagcagatagccgacgcgggtggtatctttcaacagcgtggcaatcaccagcaccgagatcatcaccaccatgccgatgctgataaatttctcaccgcggccgatcgccttcagccccaggtagagtacccctgccgccggaacgaaaaacagcacgctgcccagcgccggcgagatgccaaacagggagtgcagcagcttaccgctgccggtcatatacgccgtcaatgccccgacgctattgacgcagacggagagaaacatcatcagcgcgccaaagccgccgacgtagcgcttcgataatccactgagctgcagatgtttacgggtgcgcagcgtggattccgcgacatagagcatagtcaccgtcgtcaggctgcccaccagcaccagccagaacagcagcggtaagaagcccgctttgctcgacgcataggcgatagagaggacgcccgcgccaatattggtaccgacaatcatcgataccccttcgacgaagctcagagattttgcagggacagccgtacgttcccggccggtgaggacgggagaaaaggtggagttttcagacataatactttccgttttactccggcggttttcaccgccggaaaaaaggtgatatcagagtgataaaccactcacgctgagcataaacagccggctgcggcgtcctgtttctgttcggcttccctgccgccgcagcccgccggggagacgttagctcttcagtacgcgcgccagaatatccagcgctttcgagaactgggcgtcggggatagtcaacggatacaggaagcggatcacgttgccgtagacgccacagctcagcagcagcaggccgttctcctgcgctttctgttgcacaaggcgggtgaattccggcgacggttcgcctgtttgcggatcgttaaactccaccgccaccatcgacccccggccgcggacatctacgatcgccgggcaggtagcgcgcgcctggttgagcacttcctgcagatggctacccagctgttcagcgcgctgacacagctgctcttcggcaatcacatccagcaccgcgtgcgccgcggccaccgccagcgggttaccggcataggttccgcccagcccgcctggggctggcgcatccatcacctcggcgcggccgacaacgcccgacagcgggaaaccgccggcgaggcttttcgccatcgtcatcagatccggtttcacctcatagtgctgcatagcgaacagcttgccggtgcgggcgaaaccggtctgcacttcatcggcgatcagcagaatgccgtgggtatcgcacaggtcgcgcagcgcctgcataaaatcggccggcgcgacgttaaagccgccttccccctggatcggctcgagaatgatggccgctacctggtccggcgcaatatccgctttgaaaatgcgctccaggcttttcagcgcatccgcggtggtcacgccatgcgccgcattggggtaaacgccgtgatacaccgagcccgggaatggcccgaagccgattttgtagggcgcgaccttaccggtgagggccatggtcataaaggtacggccgtggaaaccgccgccgaaggtaatcagccccggacgaccggtgtaagcgcgggcgattttcaccgcgttctcgaccgcttccgcgccggtggtgaagaaagccgtttttgccggcccgtcaattggcgccagatcgttgatacgctccgccagcgaaacatagctttcgtacggcacaatctgataggcggtgtgggtgaacgcctgcagctggtcggcaaccgcggcgaccactttcggatggcggtgaccggtatttaacacggcgatcccggcggcgaaatcgatcacctcattgccttcgatatcccacagcgtggcgttttccgccttctcgacaaagtagttacacattacgcctacgccgcgcggcgtcgcctgctggcgacgttgattcagttctgagcttttcacctgcgaatctcctgtcgtgtatgtcacgttatcgcaacaaattagaaacgatgtcgtttatttacacaggagttggccctataatcgagtaccaattttgaatatctgagggatccaattgcgttcgctggtgggtgacctggtgctggtccgtctgcaggaagagcgggatcctcttctgcacaaacgcttatataacgcgctgcgccgcgcgatcctcgacggttcgctggcaccgcaaagccgtctgccgccgtcgcgggacctggcgggcgaacttggcgtatcaagaaacaccatattaacaacttatgaacaattgctggcggaaggatatgtggtttcccgtcggggaagcggaacattcgttgcccaaaccgcccctgagagctcattgacggctaaaggtcagcaagaaaacagcagtatcgcagcaccgacggcgcatctttcacgccgaggccaacatctgctcggccaggtcagcgccagcccgcgccagtggggagcgtttatacccggcgtgccggacgttaacgcctttccccacccgctgttcagtaagatccaggcccgcatcagccgtcggcccaaaccggagcggctcagctatagctgcaacggcggcactccggaactgcagcaggcgctggtggattatctgcgcgtgtcgcgcggcgtccactgtcagtcagatcaaattcttatcaccgaggggatccaccaggcgatcgatctggtcacccgcatgctgtgtgataacggcgatctggcgtgggtggaggagccttcctactgggggatccgccacgtgctggcgatgaacgacgttcgggcagagcccctgaccgtcgatgccaacggcctgtgcccgccggagacggttgacgatgcgccgaggctgatcttcgttacgccttcccaccagtatccgctgggcgcggtgatgagccttgagcgccgccagcggctgctggcgctcgcccgtcagcaggggagctggatcgtcgaagatgattatgacagcgagtttcgcttttccggtcagccgatccccgccctgcagggtctggtcgccgacgccccggtggtctatatcggcaccttcagcaagacgctctatcccggcctgcgcctgggctacgtggtgatcccgcggccgctggtcagcgacctgaagcacgcccatgctgagctttaccgcggcggccattcgctgatccagatggcgctggcggagtttattaccgccggccactattcggcccatatccgccgtatgcggctgctctacagccgtcgccgcgcctttttaactgagcttatccagcagcactgtatgccgtacgccctgtctgacttcagcgataatgccgggctgcatttgatcctcaatttgcccgcagaggctgacgatgtggcgatcgccagagaggccaatgcgcggcacattctggtgcggccgctgtcgcgctactacctgacggcggcgcgcaagaaaggattactgatgggattcgccagccagcccgaagagcagatggcgtcggcgttcagcgtcttactcggctgcctgcagacgcactgcccgcagatgctcctgctccgggaggacgcagaaaaacaaaacgccccaacctgaggcggggcgttatcggggagcctgatatcaggtatcaggcaggcgtggcgtatcaggcttcgatagcggcacgcagttttttcatggcgttcttttccagctgacgcacgcgctctgcggagacgccgtagcggtcggccagttcctgcagcgtggacttgttatcttcgtccagccagcgggcgcggatgatgtcctggctacgctcgtccaggccctgcatcgcgtcagtcagcttattcgccgcctgctcttcccagttatcgtcttcgatgccgtcggcaaagttagacgttttgtcctgcagatacaggaccggcgccatcggctggctgtcggactcatcgtcggacgacatgtcgaaggtcatgtcctgggccgccatacgggattccatctcgcggacgtctttgctcgacacgcccagctcacgggccaccatttccacttcatcctggttgaaccaacccaaacgctgtttggttttacgcaggttaaagaacagcttacgctgtgctttggtggtagcgaccttcacaatacgccagttgcgcagcacgtattcgtgaatttcggctttaatccagtgcacggcgaaggagaccaggcgcacacccacttccgggttgaagcgacgcacggctttcatcaggccgatattgccttcctggatcagatccgcctgcggcaggccatagcccgagtagttacgagcaatgtgaacaacaaagcgcaggtgagacagaatcagctttttcgctgcttccagatcgccctggtaatgcagcttttcagcaagctcccgctcttcatcagccgacagcatcggccaagtgttagcggcccggatgtacgattccaggttaccaacgggggctaaagctaaagtttgcatttctttggtcattcaaatcctctcaattgatatcttctgacgcgttcttgtccccatcaggcaacaagcatgccagcattcatgagcaacgagaatatcactcacattagtatcagacagtgattttatccacaagttccatgcaacggtgtgaataaattacgcacaaaatgtgacaccacgatgaaaaagtgagggcaggaaaaggggaacaagcttgcggtatctttccctgcgaacaggaactcattgcagcagggaaagattatatcacgcttttattaatcgggagtaaagtgacgtaaatgttgcactgtcgccagccaggcggctacccacccgatcatcgagcagacgatcaacatcaacagacactcgtcgaagcctaagccgctcagctcaaactgggtgccgaagactttcgccacttcggtcaccgccgacgagaggcgcattaccagaatctccgacaggatcagcgataaaaacgcgccggaaaagcccagcatcgctccgccgtagaggaacggacgcaggataaagccgtcggtggcgccgataagcttctgaacgttaatggtatcgcggcgggcgaagatgctcaggcgcacgctgttgccgatcaccaggaacaccgccgccaccatcagcacgccgatcatcgccgacacgcgtcctaccagcccggtgagcgaggagagacgggcaaaccagctgtcgtccatccgcacttcatcgacaccctggatccgcgatacccgatcgcgcagggtattcagcgcctcggtgctctggaaatccagcttcggcaccacgatggcgaccgccggcagcgggttctcctccagcatatccagggcgccgccaaagccagaccagttacggaattcccccagcgcctcgtcacgggacaaatagtttaccttgtcgacgccctgctccgcctgcagctggcccaccacccgcgccgcggcatcgtcatccagcgttttttccagataaacggtgatctgcggcgagggataatactgggacgccgcgctgctgacgtttttgtagaccatgtagcagacgcttggcagggtcaacgaaatggcgatgaccattaccgtcaggaaggtcgccagcggcgtgctttttagatcctgcagcgcgccgtgccaggcatagcgcacctgctcgttgaatacgttgctcttacgcgaggccgggttaggcgccgctttcggccgttttggcgcattgcgcccgccgccgccgccgcccgcggcgttgcgcaggcgatcgaacttgctgccgaactggcgaatctggttcattgcgtcgcgcttattcaccccgaatgcctccatgcagatggccgtcgctaagcgtcagcacgcggtacggacgactggagataagccccagatcgtgcgtggccatcagtaccgtcaccccgacgcggttaaactcttcaaacagacgtaaaatcccctccgagagcgcctcgtcgaggttgccggtcggttcatccgccagcagcaccgccggcttgttgaccaccgcgcgagcgattcccacgcgctgctgttcaccgccggagagctgaatgggaaaattcttcgctttgtccagcaggccaaccttgtccagcgccgccgagacgcgacgacgaatatcatcgccgctggcgccggcgataatcagcgggatcgccacgttgtcatacacggtacgatccatcagcaaatggtggtcctggaaaatcataccgatctggcggcgcaggaacggcacctcacggctcttcagacggctgatttcatgaccgctgaagaagattttcccggcgctgggccgttcgataccacagataagcttcagcagggtactcttccctgcgccggaatggccggtcagaaacgccatctcgcccggctgcaggtggaaggtcaccccctgcagcgcttgtctcccaccgagataggctttgctgacttgttcaaagcgaatcattcttaatcctctcgggcaaaaagtgcctcaataaagtcgcccgcattaaacggacgcagatcctcaatacgctcgccgacgccaatatagcgaatcggaatgccgaactgatcggccaccgagaagatcacgccgcctttggcggtgccgtccagcttggtcagggtgatcccggtcaaacctaccgcctcatggaacagtttggcctggctaacagcattctgcccggtgctggcgtcaatggttaacatcacctcgtgcggcgcgtcgacgtccagctttttcattacccggacaatcttcttcagctcttccatcaggtgcgatttattctgcaaacgcccggcggtatcggcaatcagtacgtcaacatgacgcgccttcgccgcctgaatggcgtcgaaaatcaccgaggcggagtcggcgccggtgtgctgggcgatcaccgggatattattacgctggccccagacctgcagctgttccaccgccgccgcacggaaggtatcccccgccgccagcatcaccgacttaccctgctgttcaaactgacgcgccagcttgccgatggtagtggttttccccacaccgttcacgccgaccatcagaataacaaatggcgttttgccttcaacgttcagcggctcgtctactttggcgagaatctcgcccatctcttctttcagcaggccgtacagcgcttccgcatcgcgcagctgcttacggctggcgccttccgtcaggttggtaatgatcttgcgggtggtttccaccccgacgtcggcgatcagcagctgttcttccagctcttcaaacagatcatcgtcgatcttcttaccgcggaacaggctgataaatccggaaccgagattttgcttcgttttcagcaggctacgtttgaggcgggcgaagaaaccttcttttgtcggtttttcctgctcctgagccagcgcttcaagcggcgcctcgtcctcgggcgccggcaccactaccgccgcctcttctgccgcttcggccgccagcgcctgcgcttccagctcttcatcgcttaacggcgcgtcctcttcgggcgcttctgtctcctgcggctggacaacgatgccttccacaggctgctctgctacggcttccgccaccaccggttcggcgataacctcttccgccagcggctcaaccaccgcaggctgttcaggcggttcgctgaccgcgggctccggttcaacaacaggcgtttcttcggtcagagcaggcgtttccacccactcttcttcctgcgcgctggcaggctccgcgaggtgcgctttttcgctttcgaccaccgtctcggtcacttcgacgacgtcttcggcaaacgcctccgggtctgctttcggcgcgctcggctcagcaggggtttcaaccgccggtatctcttcggcaaccgcttgctgttcttctactttttgctctgtctcggtttcctgtgcctgttctttctgtccaaagcccagccaggaaaagaagccacgttttttctcttttgccatttgcgaccacactcctcgctgtttattcatggcgcagcttcatcagaagctgaaaaaatgatgaaattagttggatagtctatcacttaacttaactcgcagcaccgcccccggattaaggtttcgtcaaccgccgtcgatcgctagaatagcaggctggaagttgagacttgagcagagagatgaaaaaaccaaaccacgcgggcagcggtcagatccgcatcatcggcgggcaatggcgcggccgtaaattaccggtgccggagagcccgggcctgcggccgaccaccgaccgggttcgcgaaaccctttttaactggctggcgccgtccattgttgacgcgcactgcctcgattgctttgccggcagcggcgcgctggggctggaagcgctgtcccgctatgcggccagcaccacgctgctggagatggagcgcggcgtagcccagcagctgcaaaaaaatctcgccaccctgaaagcggatcgcggcaaggtgatcaccaccaacaccctcagcttcctgagccagccggggaccccgcaccagatcgtgttcgtcgacccgccgttccgtcaggggctgctggaggagacgctacgtctgctggagacacaaggctggctggccgatgaggccctggtgtacgtcgaaagcgaagtcgaaaacggcttaccgccggtgccggctaactggcaattgtatcgtgaaaaagtggccggacaggtcgcctaccgtctttaccaacgtgaggcccaaggagagcaccatgctgattaatttaggccgcctgctgatgctgtgcgtctgggcctttctgttattgaatctgtttcagcccttcccgaagccgctgaatatctttgtcaacgtcgcgctgattttcatgatcctgatgcacggtctgcagctgacgctgctcaaggcgacgcagccgaaagaggcgccgccgctgagccgctttgagcaaatccgcatttttattttcggcgtgtttgagctcgtggcctggcagaaaaaactgaaggcgacgctgaaaaaatagtcctgaaaagggctcagggatcgggcgtaaacgccacgaacgctgtgcccttataactcaacatcccacgatcgccgacgctcagcgcgtgatattgcggcgcgtcaaggcgaaacaccacctccagcccaccgttttcggggcgaaagctcgcttcatagcgcatctcactgcctgcaggcgtcaccgtctgctgccgcgagcgccgatcgttaatcactttttcccgtttattgctgacgataacccgcttttgtagcaacggcgcggcgtcattcgcctgtttctcacggcgctgctggacatagcgaaacgaagccgccaccacaatcaccgcgacgaccagaacaaaaaagaggggcattttactcatcaaggttacccataaaaaatatcaggaatcagcatactgcgtcgggaataacattgtcatctgctacgccaaaccactacactgagtagtagcatcacgcatccgtaactttctttatgataacagatacagggacttactatgctttggtcatttattgctgtctgtttctccgcatggctttatgtcgatgcatcctatcgtgggccggcatggcgacgctgggtttttaaacctgtcaccctgattctgttgctgttactggcctggcaggcgccgatgttcaatgccatcagctatctggtgctggctggcctgtgcgcctcgctgctcggcgacgccctgaccctgctgccgcgccagcgggtgatgtacgcggtgggcgctttcttcctgtcacatctgctgtataccatctggttcgccagccagctgacgctgtcgttcttctggccgctgccgctggtgctgctggtattcggcgccctgctaatggcggtgatctggagtcggctggaagagatgaaaatgccggtgctgacctttatcggaatgacgctggtaatggtctggctggccggtgagctgtggtttgtccgccccaccaacaccgcgctgtccggtttcgccggcgcagccctgctgctgctgagcaatgccgtgtggctggtgagccactatcgtcgccgcttccgcgccgataacgccatcgccgccgcgttctactttgccggccacttcctgatcgtgcgcgcgctgtacctgtaatttagttcttgactctggagtcgactccagagtgtatcctacggctaatgagaaaattatcatttcccggagggtgccatgtcgactccagacgcgcaggataaaaaagttccacaattctcgtctttcaccatgcggccagcaaccgccccggcggagagctgctgtacagatcacgcctgcgccacagagtccgcccctgccgccgaagcgcttagcgacgcccgctatagctggcaagttgatggcatggactgcgccgcctgcgcccgcaaggtggaaaccgcggtccgtcaggtgcccggggtcagtcaggtccaggtgctgttcgccacagaaaagctgctggttaacgccgagggcgatgtccgcgctcaggttgagaacgcggtccgccaggcggggtatacgctgcgcgatgccgatgctcccgcagctaagcaaacccgagggtcgctgctgcgcgacaatctgccgttactgacgctggttatcatgatggccttgagctgggggctggagcaggccaaccaccctgccggtcagttggcctttattgccaccaccctggttggcctgtggccggttgcccgccaggcgctacgcctgatcaagagcgggagctggttcgccattgaaacgctgatgagcgtcgccgccatcggggcgctgtttatcggcgccaccgcggaggcggcgatggtgctgttgctgttcctgatcggcgagcgtctcgaaggctgggccgccagccgcgcacggcagggggtgagcgcgctgatggcgctgaagcccgacaccgccatccgtctgcgcaacggcgtgcgggaaaccgtcgcccagcgcgacctgcgtcccggagatgtgattgaagtggctgccggcgggcgtctgccggcggatggacaactgctgtcgccgtttgccagctttgatgaaagcgccctgaccggcgagtcggtgccggtggagcgtcaggccggggaacgggtagcggcgggcgccaccagcgtcgatcgcctggtgcagcttaccgtgatatccgaaccgggcgacagcgccatcgaccgcatcctgaagctgattgaagaggctgaggagcgtcgggcgccaatcgagcgcttcatcgaccgcttcagccggatctacaccccggccattatggtggtggccttgttggtcgccattgtcccgccgctgttcttcgccagcgcctggctaccgtggatttataaagggctgacgctgctgctgatcggctgtccgtgcgcgctggtcatctccacgccggcggccatcacctccggcctggcggtcgccgcccgccgcggggcgctaatcaaaggcggcgcggcgctggagcagctgggccaggtgcgccaggtggcgttcgataaaaccggcaccctgaccgtcggccagccgcaggtgacttcggttattgccacggccgaagttgacgacaacgcgctgctggcgctggcggcggcggtggagcaaggctccagccacccgctggcgcaggctatcgtccgtgaagcgcagcggcgtcagctgagcattccgcttgccagcggccagcgggcgctggcgggctctggtatcgaagccgaagtcaacggcagccgcatcctgatctgcgcagccagcaaagccgccccggcagagcatgaggcgcagatccagcagctggaaagcgccgggcaaacggtagtgctggtgatgcgcggcgagacgctgctcggcattctggcgctgcgcgataccctgcgcgacgacgcgcgtcaggcggtggatgctttgcatcagttgggcgttcagggggtgatccttaccggggataacccgcgcgccgcggcggccatcgccagcgaactggggctggaattccgcgccggtctgctaccggcggacaaggtcaacgcggtgatagcgctgaatgccgacgcgccgctggcgatggtcggggacggtatcaacgacgccccggcgatgaaagcggccaccatcggcatcgccatgggcagcggaaccgacgtggcgctggagacggccgacgccgcgctgacccataaccgtctgaccggcctggcgcagatgatttccctggcgcgcgccacccacgccaatatccgccagaacatcgcgattgccttagggctgaaggggattttcctcgtcaccaccctgctcggcctgaccggtctgtggctggcggtgctggcggataccggcgccaccgtgctggtaacggctaacgcgctgcggttattgcgtaagaagttgtagcatcgataccggcttccctgctcgcgctacgcttagcagggctacggttccagaccgtcgggtagcccggataaggcgctacgcgccgccatccgggagaggctcagtggcttttgcggatcaggtagcggtacggcagggcttcggtttcctgggccaccagctcatgctccataaagcggcagaatcccgggatatcgcgggtggtggccggatcgtcagcaataatcagcagcgtctcgcccaccggcatcgtccgcacggttttacgcaccatcatgaccggctccgggcagcggagtcccagggcatccagggtgtggtcaggagtggagaaaagttcgctcattttagtctcacgtcaacaaaacggccctagtttaccccctgctcgccagtacgcaagccaggttaacgtttgcgcgaaaaacaaccattgcattacgccggcaacgcagtatcatgcagccgtttttaattgggttccctcaccccaacgttccgctgccgattgctcattcacctgaagcatgacgggcataaaaaggtcacaatatgaatccgtttactaccgtacagcgcaaaaaagcgctcgtctggctttcgctatttcatttgctggtcatcacctccagcaactatctggttcagctgccgatctccatctttggtttccataccacctggggcgcgtttagttttccgtttattttcctcgccaccgacctgacggtgcggatttttggcgccccgctggcgcgacgcatcattttcgcggtgatggtcccggcgctggccatctcttacggcatctccgcgctgttctacatgggcgaatggcagggctttgccgcgctgggcacctttaatctcttcgtcgcgcgcatcgccgtcgccagctttatggcctatgcgctggggcagatcctcgacgttcacgtctttaaccgcctgcggcagagccgccgctggtggttggcccctaccgcctcgacgctgttcggcaacatcagcgataccgtggcgtttttctttatcgctttctggcgcagcccggacccgtttatggccgcccactggggggaaatcgccctcgtcgactacagctttaaagtgcttatcagcatcattttcttcctgccgatgtacggcgtgctgttaaatatgctgttgaaaagactggcggataaatctgatttgtcggcattacagccgagttaaaggtactcgcgggctgatgtgttaagatagccggatgagccattagtggccgtttatcgaaaggaagatgtcaatgcgcaatttggttaaatatgtcggtattggcctgctggtgatggggcttgccgcctgcgataacagcgattcaaaagcgccaaccgttggcgcagcagcggagagcaatgccagcggccaggcaatcagcctgctggatggcaagctgagcttcaccctgcctgcgggcatggccgaccagagcggcaaactgggtacccaggcgaacaatatgcacgtctactctgacgctaccggccagaaagcggtcatcgtcatcgtcggcgacagcaccaatgaagatctggcggtgctggcgaaacgcctggaagatcagcagcgcagccgcgacccgcagctgcaggtggtgagcaataaaccgctggagattaaaggccataccctgcagcagctggacagcattatctccgccaaggggcagaccgcctggtcttccgtgatcctcggcaaagtggatgacaagctgctgaccctgcaggtcaccctgccggcggataaccagcagcaggcgcagaccgaagcggaaagcatcatcaacaccctcaccatccagtaattactggcctggtgcgctggcctccggttcgctaaccgggggccgtttttttagccgccagcccaacagcagcgccgccatcaccagccccgccgcggcgagataaatcatcgagatcccggtccacgccatcagcaatccggccagcggcccgctgacgcccaacgacaaatccataaacacggtataggtcgccagcgccgacccctgattgtgctgcggcaccgctttcaccgccaccacgcccagcgccggaaagaccagcgaaaagccagccccggtaaggaaagtaccgattttcgccatcatcggcgtatcggcaaagccgaccagcagcaggccgatcgcctccacgctaaagcagagcatcgccacgttcagcccgccgagtaggttaatggcgttgggaaacagcagccgcgcgccaacgaacgcgcagctgaataatgtcagcgcgaaagccgcgccgtcccaacctttggcgtcataaaatagcgtgataaaggtggcgatcaccccaaagccggcggaggccaacgccagcgccatgccgtagggccagacccggccgagcaccgcgcgaaacgacatcgctttgcctttggcagccttcaccgccgcgcggggcagcgcgcagaggatagccaccagcgctaccgccataatgaccccggccagaccgctgaggccaatgtgcgaatagcacagcacgccgagcggcgcgcccatcgccatcgccccataggtcacaatcccgttccacgagatcacccgcccgatatgcagcgaaccgaccacgccgacgccccacagcgtcgagcctgtgccggcgaagctctggccgataccaaggatcacccgtccgaggcataacagcagcaggctaatcagtggccagccgctgccccaggcggccagcagatagctcaaaccgctcaaaaagcagccgccgaggccgaagacgacaatctttttgggccccagcaggtcggcatagcgcccggcatgcgggcggctgagcagcgtggcgaaatattgcaggctaatcaccagcccggcccagaaagcgctaaagcccatgacatcatgaacatagccgggcagcaccgccagcggcaggccgatggtgaggtagctggcaaagttaaagataacgacagagacaatccgcagattgaggcgcagtccattaagcgccggttcggcgacgggttcgggcatcaggttccaccagatttcgacaaccagctttcactattaccacgctgtcggcggaaaagcagccctcctttcggaatattggcagtcggcgaaccgctacacttatctggcgcgactcataaaaggaatacctatgtcccctccgcaggctgataaagccgggcttcatattttacttaagctggcggcgctggtgattatcctcgccgggatccacgccgccgccgatatcctggtgcagctgctgctggcgctgtttttcgctattgttctcaacccgctggtcacctggttcattcgccgaggggtgcggcgtccgttcgccattaccctggtggtgacggctatgctggtgatgctcaccgcgctgctcggcgtgctggcggcgtcgctcaatgactttgtcgccatgctgcccgatttcaaccgcgccctgacgcgcaagatcctccagctccaggagtatctccccttccttaatctgcatatcaatccggagcggatgctgcggcgcatggattcagaacggctgatgacctgggccacgacgctgatgacccagctttccggggcgatggccagcatcgtgctgctggtgatgacggtgatctttatgctgtttgaggttcgccacctgccctacaaactgcgttttgccctcaataacccgcgcctgcatatcgcaggattgcaccgggcgctgaaaggcgtcacccattatctggcgctgaagacgctgattagcctgtggaccgggctgattgtctggctggggctgctggcgatgggggtacagttcgccctgatgtggggggtgctggcgtttttgctgaactatgtgccgaacattggctccgccatctccgctatcccccccatgctgcaggcgctgctgttcagcggcatctatgagtgcctgttggtaggggcgctgtttctggtggtgcatatggtgctgggcaacatggtggagccgcgcatgatgggccaccggctggggatgtcgaccctggtggtgttcctgtcgttgttggtctggggctggctgctggggccggtgggaatgctgctctcggtgccgttaaccagcgtctgtaaaatctggatggaaaccaccgtcgggggcagcaagctggcgatcctgctcggcccgggccgtcccaaaagccggctccccggctagcggcgtttcaccggccagaagatggtcaatacgccggcgacgatgatcgccacgcccagcagcgattgccagtagaacggctcatgccagccgggcagccagatggcggcggcccacacgaggatatagctcaggctcagtagcgcatacgctttcgacagcggcaggcgatggagggcaaagtaccagcagaccatcgacagcaggtagcccagcaggccgaaaaacaggccgaaagtcccgggctggaaatgcagcagatgctggagaaatgccacaatatcggtcagcggcggcaaggccaccatggcgctgcgcagcagcaactgcgcggcgctgacgaggccgacgctgagtaatgcccagaaaaagcccatcagacgctggtccccagaatgacaatgcccacgacgatcaacccgacgccaagccagtggcgacgggcgaccggctcatgccagatgccccagcccgcgagggtaacccagacgaaattcagactcagcatcggataggcgatgctgaccggaatagactgcaggacgctcagccacagcagcatgccgcagcccagacataacagcgccatccccaaccagaagagtatatggcgactccgccgtccgcgacgggacgggcgggtcgcctgtttctggcagagctgtccggcgcagctcagcaggctggcgcacaccagacagatccagacgctcattgcggcaggtactgaaggaaaacgacccggcccagctcgtaggcgttatccggtttcggtaacggtaagtcgagcatactctctcctttatccatcaacagcaccagcgagaccggcccctgctgacgatgcgcggccagccagtcggcaaaaccggcctggctgacaaagcttccctgagcatccggccagtcgagaccgtacttcagctcaccctgtttgtcgaacataataatatcgcttcgcttcagctcccaggccaggccgccggcgatcccaacgttgttggtcaggacgtaacggctgggctgcagggattcgctgacgatatccacgaggaactgcggctgtttgctgtcgataacccggtccgggatggcgaagcccaccagcagcgccaggccgagcggacagagcgcggcgaggctccagcggcggccagagtctttcatcgccagccagcccatcagcgcccagacggcaaaagcgatcgccgccagcagacatttatacagctcaatcttggtccacaccggcttatgcatgaagccccacggcgagaccaccagcacggcgataagccccagcaaaccaacgcccaggttgatcatcccgttgatgcgcaacgctttcgcgccggtctttgcggcctccagcgcgtagcgggccatcaggatcgacagcggcgcaaagcacggcagaatataggtcggcagtttgcctttggcgatactgaagaacaggaacggcatcgccacccaacctaacagatacagcgcgccgcgggcctcatcgcgctcaagccagccgcgctttagcgcccccggcagcagggccagccacggcagactgccggcgatcaggaacgggatgtagtaccagaacggcgctttgtgctgggcgtctttttcagcaaaacgctgaatatgctcgacccagaagaagtagcgccagaagtccggctcgcgctgagcgatagccagcccccagggcagcaccaccagcgtacagacgattaccgccagccagccgtaggtcagcacttcacgccagcgtttacgagcgatcacccacggcagaacgcccaccaccggcaccgccagcgccaggaagcccttggtcatcacccccatcccgcaggcgacgcccagcagcacgtagcccagtattttgccgctgcggctgtgcgcctgcgccgcgccccagaagctgcacatcgccagcgccagccacagggtgatcatcgggtccagcaccgcataggtgccaatcgcatacaccagcatcgcggtgaggaagataatcggcgacaggatagctacccgcttatcacgaaagatccgccacgccagccaggccaccagcagggcggtcatggtgatggcgaagaccgacccgaagcgtacgccgaagttattatggccaaacagccactgaccgatactgttgatccagtaaccggcaatcggtttttcgaagtagcgcaggccgagaaaatgcggtaccacccagtcgccggtggccagcatttcacggctgatctccgcgtagcgggtttcgtcgggttgccagagcaaacggaaattgagcggcagcagataatacagcgcaaacagcgcaatcagagagacgccatagcgaatgcttttcatcaaacacccgaagtcagtaattgttcacgtccgagccagccttcccggccagccagttcaccacgaaccactttgcctgagggcagctcgctaaagtcagcgggcagcagctggctcagtgggcaaaactgaatttcttcttccgccgccatggtcagtagttcattgaactgatcggcgtaggcaatgccttccacttcagcgtgaatggtatagaccggcacgcccgcatcgcgatggatgcagtccagcaggtagcggttaaagccggcgatatccaccgccgtgcccaccgcctcgtcccaggtcggcaacgtgaccgggatctgcaccgtaccggaaacgccgctgccgagctggggcagaaacggccgcgtgccgcgacagtcgctgttgtagagaaaatcgaaggattctttggctttaaccacccgctgatcggcgcgccagccggcgacggccgagcaggtcaccggccggccgatgatgcgctcgagctccagcaggccgcgctcaacctccagcgccagcctttcctgcggccagacgccgctccacgcctgccagctgtagtggtcccaggcgtgcaggccgacttcatgagattcggcggcggcgcggagcaccgcttcgttccctgcgccgatgcggcgccccggccaggcggtgccggccagcagaatatcccagccgtacagcgaggcggctctggaacgcagcatcttccacagaaacttcggttttatcaggcgccacagatggcgccccatattgtccggcccgacgctgaagaagaagcttgcctggatcccatgccggcccagcagctccagcagccgcggaacgccgtcccgcgtgccgcgaaaggtatcgacatctatgcgtaagccgacctgtttcatggatttttatcgtccaccagttcaaccgtgcgcaggaagaagtccagcgtgtgttcgaccgtttcttccatctccaccttcggctcccagttcaggcagcgtttggcgttgcggatgctcggcttacgatgctcaacgtcctggtagccctttccgtagtaatcgctgctttccacttcacggaagccggcgaacggcgggaagcgatcgcgcagcggatgacgttcgaagcaggcgagcagcatttcggccagctctttgatactcgcttcgttatccgggttgccgatgttaatgatctgcccgtcgcagcggccgtctttgttctcgatgatgcggaacagcgcttcgataccgtcgctgatgtcggtgaagcagcgcttctgcttgccgccttcgataagcttgatcggcgacccttccaccaggttgaggatcagctgagtgatggcgcgggagctaccgatacgcgcggcattaaggttatccagacgcggccccatccagttgaacggacggaaaagggtgaacttcaggccgttcttatcgccataggcccagatcacgcgatcgagcagctgcttggagaccgagtagatccagcgctgtttgttgatcggccccaccaccaggttggagctatcttcgtcaaagtttttgtcggtgcacatgccgtacacttccgaggtcgacgggaagataatgcgcttattgtatttcacgcagtcgcggatgattttcaggttctcttcgaaatccagctcgaacacgcgcagcgggttgcgggtgtattcgataggcgtggcgatggccaccagcggcagcaccacgtcgcatttcttaatgtgatactcgatccactcagagtgaatgctgatatcgccttccacaaagtggaaacgcggacagtcgagaaaacggctgatggcgtcggagccgatatccagaccgtaaatctcatagttgtcgtcctgcagcaggcgctcggtcaggtggttaccgataaagccgttgacgccgaggatcagcacccgggtgcgacgcttaatcgccaccaccggtttgctgctgatcaccgccccggacaccaggcccagcgcctgcgccagctgagcgccctgcatgtacacgccgcgttcggtctggccggtgacaatctccagcgccccgtcctggcacgcgacgatcagcggagcaatggagagcacggtgcccggtttagctgctggcaaatcgtggcgaacgcgggatttccagacgataaacttgttcgctccggcgtagccgaaggcgcccggccacggatccgagaccgcacgcaccagattgtgcagggtctgcgccggcagctcccagtccagccggccatcttccggggtacgacgccccacataggttgcctggctgtgatcctgcggacgctcatcggtggtgccggcgaggatcgccggcagcgcccggctcagcagctcagtggcggcagcgcacagcttacgatgcagcgtcagggcggcgtcatccgcgccaatcgccacggcctgctgggcgacgatatcgccagcgtctgcgcggttcaccatccggtgcagggtgacgccggtttcgctttcgccattgaccagcacccagttcagcggcgcgcggccgcgatattttggcagcagcgaaccgtgcaggttgaacgcccctttcggcgccagattgaggatctcatcgcccagcaggttgcgatagtagaaggagaacagcacgtccggcttcatctcgcggatacgctcaatccacagcggatggttcacgtcttccggggcccacaccggaataccctgctcggcggcaaggcgcgccacggagccaaagaaatggttttcgccagggttatccgggtgggtgaaaatagcagcgatatcatacccggcgtccagcagggactggataccggtgcagcccatatcgtgataagcgaagactacggctttcatgaacgatcttcctctttagatgccgtttccggctggcgaacaacacgttgaataaagtagcgggggcgggcgcgcacgtcgttatagatgcggccgatatactccccgagcaggcccataccgacaaactgggcgccgatgaacatgaacagcacggcgaagagcataaacaccccttccgccgcccactgcgggccaaaggccagacgcagcaccaccagcagcaggccgaaggcgaagcccagcagggcaatcacgctgccgaaaatgctgagcagacgcagcggcgtggtggtcagacaggtcaccaggtcgtacatcaggttgatcaggcgcataaagctgtatttggagtcgccgaattcgcgctcggcgtgcatcaccgggatctccaccgcgcgccgggcgaaggtattcgccaggatcgggataaaggtgctgcgctcatggcagttgagcatggcgtcgatgatatggcggcggtaagcgcgcagcatgcagccgtagtcgcccatcgctttgccggtggtgcgctggatcaggcggttgatcatcttcgacgcggttttacggaagatgctgtcctgacggttctggcggacggtgcccaccacgtcgtaaccttcatcagccttcgccaccagccgcgggatctcctccggcgggttttgcaggtcggcgtcgagggtaataatcagatcgccggttacatggctgaagccggccatgatcgccgagtgctggccgtagttacggtttaacagcacggcgacgacgtggctgccttccgcctcggcggcttcggtgagcatgcgcgcggaatcgtcgctgctgccatcgtcgatcaacagaatttcatattgccgccccagggtggcgcaggcggcatccgtacgacgaagcagttccggcaggctatcctgttcgttataaaccgggataaccaccgagaccttcttcacgggagggtaagtaagcatatcaacgtcctgacaactggcgcagtgcggagataacgcgagtgacatcgtcatcggtcatatccgggaacaacgggagagagcagatgcgggcgctgttccattcggtattcggcagggaaacctcagggaagcgctcgcggtaatatttttgcgtatgggccgcacggaagtgcaggccggtgccgatgcccatcgccttcagcttttccatcagcgcgtcgcggctgatgccgcacgcggcctcatcgacgcggatgataaacagatgccaggcgtgctggtgatcccaggtcgggacgctcagcggtttaaacggcgtgtccgccagctcgcgcaggtagcgctgggcaatctcggtccggcgctgattggcgtggctcagtttttccagctggaccagcgccagagcggcattgatatcggcaaggttgtacttgaagcccggggtgatcacctccgcctgcggcgcgcggccgtgggtctggcgatcataagcgtccacgcccagaccatggaatttcaggctacggatgcgggaggccagctcgtcgtcatcggtgacaatcagcccgccttcggcgcaggtcatgtttttgatcgcgtggaacgagaaaatggcggtcccctgccagcccacgtggcggcctttataatgggtaccggccgcatgggcggcgtcttcgatcaccgaaatgccatggcgctcgcccaccgcgcgaatggcgtcaatgtcggctggcgccccggcgtaatgcacgggaattatcgctttggtacgcgaggtgatcgccgcttccaccgctgcaggggtaatcatcagattgtcgttatcgacatcgatcatcaccggcgtggcgcccagcaggcagatcatattgagagtggagacccaggtctgggacggcgtaatgacttcatcgccggggccaatacccagcgccatcagggtcacatgcatcccgccggtcgctgaactgacggcaatcgcatgacggttgccggtcagctggcagaatgccgcttcaagtgcctgattcttcggcccggtggtgatccagcccgacgctaaaacttcacgcagcgcagccagctctgcgtcgcccatcgacgggcgcgaaaaaggcaaaaaatcgctcatcatcatcctgttctgtagatgacccacgcacgaatctgggtcgttagaataaaatatcctgcgcctgcggacttaaacgaaattaaaatgaagtgagttcagcacggcattccatttcagggtatctcgaccactattaatgtagtcgaccttgcttaggataatattaagaaattaatatttctttagaacaagaaataacttattaataaacagtatgataggagttttttatggcagaaatttgacggaggagcgttcctgtcacgaaaaagagaacaggaacgcaatagttgaaattaaacgagaactaaaccagttcacaatttattattctgtcattgtcacgcttaatgacaaaaagttagcgcagatcacaaagttatttctgctgaattacaaatttgcaggaaaatccgcaggcaattcgctcgccgggcaattaatgacctcgtcattatccgcgccacagtcgcgaatgaaggtgatagtggcgaactcgtcaatcacttccgtcgggtaggccgggccggcatcgcgatacgaattcatcagcggaatatggtcgttctggaagcagatggttttttccgggttattcatgatccagcgcgggaagaaaatagtgccgtggaacagtttgtcgcccaggttgacgatcaggctgacgtcggtgccggtcggttcggtccaggagattttgtagatactttcccccacccgcacaatgtacgcttcctgatctttcacccagcgattgccgacgatgccgctgtgaatacggtagtcgagggtgtggccatttttgacgtaaatctcgtagttccagccgttgtcgtaggtatagaccagatgtttaccgataaagccgctgaggtcatgtttgtcgaaagtgctcatcatttattctcctctgttttgttgaggacagcatacgtctttaaaaaatgaatgaataacgctatgtttggattaaatacattcaaattttagattgattatgcacaagacaaccctggagcagtgggcgttactcgaaaaggtagtggaattggggagctttgccagagcagcggaggagaccaatcgcagtcagtcatcggtaagctataacctcgcgctgctgcaggagcgcttaggcgtggcgctgctggcgccgtccggccggcgggcggtgctgacgccggctggcgaactactgctgaatcaggtcaagccgctgctgcaggccttcgcctacgtcgagacgcacgccgccactctgcgcaacggggcgcggacccgcctggatctggtggtcgacagtattttcccgcgccagcggctgttcgcgattttacgccagtttcagcagcgctatccgcagacccaggtcaggctcaccgaagtgctggaaaacctggatgacgagagcgcggcgcggacggaagccgatgtgatggtgttgacccgccgccaggatattaccggccgcggggagtggctgatgaatattgatttcatcgccgtcgcccaccgcgaccaccctctcgccgcgctggacggaccgctggaggatagcgcgctggcgccgtggccgctggtgcgcattgccgatcagggcggcgatagccaggcgccgcgagacgcctggaccttctccaccattgatgccgccattgatgcggtgatgtatcaggtcggcttcggctggctgccggaggagcgcattcgcccccatctcgaccagggcgtgctgaagcggctgcccctcagccatggcgcgcgccgcgcgacgccgctgcatctgatcgtcaagcgggacctggcgccgatcgacgaacaggtggccacgctgctggcgttgttccggacgccctgaggggtaaggcggcgctggtcgcctgggcgtaatgatacgattttcttatactttccggcgcaatattgatccaggttactcccaaagtatgatgaatcactaaaatcgtcatactttcctgtcgttgagattgccgtcttgtctattatccgcctcaccctgctggcgctgctcgcctgcgtccctctgctggctcaggccgcgccgtaccagctcaccaccgcctggccggttaacgtcggcccgctgaatccccatctctatacgcccaaccagatgtttgcccaaagcatggtctatgaaccgctggtgaagtatcaggctgacggcagcgtacagccctggctggcaacccgctggcgtcactccgccgacggcaaaacctggtggttcaccctgcgcgacgatgtggccttctccaacggcgaaccgtttaatgcccaggccgcggcggccaattttcgggcggtgctggccaaccgccaacgccacgcctggcttgagctcgccaaccaaataaccgacgtgcgggccctcagcgccaccgagctgcagatcaccctgaaaagcgcctacgcccccttactgcaagagctggccctgccccgcccgttccgcttcatcgccccctcgcagtttatcgatggcggcaccgccaggggcattaaagccccgatcggcaccggcccgtggcggctggcaagctcgcagctcaatcagcgcgatgtgctggtgcgcaatgagcgctactggggtcgcaaacccgcgctacagcaaatcaccatcaaggtgatccctgacgccaccagccgggcggtggcgttcgaaaccggagaaatcgatatgctctacggcgatgaagggctgctgccgctggacaccttcgaacgctttcgccatcaccccggctacgtggctcgtctgtccgccccggcggagacggtaatgctggcgctaaacgccagccagggcccgacccgcgagcaggcggttcgtgaggcgctcaactacgccgtcgataaacagacccttgtcgatagcgtgttgtatggcacccagcaggttgccgacaccctgtttgccccctccgtcccttacgccccgcaggatctgacgccgcgccgttacgacccgacaaaagcccgcgccctgctggaacaggccggctggcagcagctggagggccagccctggcgacaaaaagccgggcaaccgttggcgattgagctggcgtttattggcaccgacgcgctggctaaatcgatggccgaaattattcaggccaatctgcggcaggtcggcgtgcaggtcaccctggtgggcgaggaggaaagcagcatttacgcgcgccagcgcgaaggccgcttcggcatgatcttcaatcgcacctggggcgcgccctacgatccgcatgcctttttaagctcgatgcgcgtcccgtcgcatgcggattaccaggcccagcgcggcctgccagacaaggcactgattgataaagagattagtgaagtgctgaccaccggggacgaggcgcagcggagaaaactgtaccatgatgtgctgacccgtctgcatcaggacgcggtgtatctgcccatcagctatgtctcgctgatgtcggtcgcgcgccaggaggtcggggagatcccgttcgccccggtgaccagcgagatccctttcgaccagattaccccggtaacgccataatgctacgctatattttacgccgcctgctgctgctgatcccgctgctgctcgccgcctccgccatcatctttctgctgctgcggctcggcgccggcgacccggcgctggattatttacgcctgtcgaacctgccgcccactgaagagatggttgcctcgacccgcgagctgctggggctcaaccagccgctggcaatgcagtatctgcactggctatggcgggcgctgcacctggatttcggtctctcctatgccacccagcgcccggtgctggacgacctgctgcacttcctgccggccaccctgctgctcaccggcgcggcgctggcgctgatcctcgtcacctccctgccgttgggcatctgggcggcgcgccatcgcgatcgcctgccggactatatcgtacggctgattgccttcctcggcgtctcaatgcccaacttctggctggcctttctgctggtgatgctcttttccgtgcatctgcagtggctcccggcgatggggtatggcgactggcagcacctgatattgcccgccgtctccatcgcctttatgtcgctggcgatcaacgcccgcctgctgcgcgccagcatgctggacgccgccagccagcgtcacgtgatatgggcgcggctgcgcggattgagcgcgcgccaggtggagcgccgacatatcctgcgcaatgccaccctgccggtggtgaccgccatgggcatgcacattggcgagctgatcggcggcaccatgattatcgaaaatatctttgcctggcccggggtcggccgctacgcagtttccgccattttcaatcgcgattacccggtgatccagtgctttaccctgatgatggtgacggtgttcgtgctggctaatctggcggtagatgtgcttaacgcggcgctcgacccgcgcctgcgccgccacgaggaggtgagcgcatgagagggctacaaagttttcgctggccggtaaaactggccatgctggttatcgcgctgctggcggtcatcgccatcggcagcggctggtggctgccctgggatccagcggcgattgaccttcagcagcggctgctgccgccgggcgcagcgcactggctcggcaccgatcatctcggccgggatattttctcacgcctgctggccgccacccgcgtttcgctgggggcggtgatggcttgtctgctgctggtgctgctgatcggcctggcggtcggcggctgcgccggactgctgggcggccgcgccgaccgcggcctgatgcgcatcgccgaactgtttatgacttttccgacctcgatcctgtcgttttttatggtgggagtgctgggtaccgggctgaccaatgtgatcctcgccattgcgctgtcacactgggcctggtacgccagaatggtgcgtaacctggtggtttccctgcgccagcgcgaatttatcctcgccgcccgtctgagcggcgccagccagtggcggctgttcagcgaccatctggccggcgcggtgatcccctcgctgctggtgctcgcctcgctggatatcggccatatgatgcttcacgtagccggcatgtcgttcctcggtctcggcgtcagcgcgccgacggcggaatggggggtgatgatcaacgacgcccggcagtatatctggacccagccgctgcaaatggtctggccggggctggcgctgttcatcagcgtgatggcttttaacctgctgggcgacgcgctgcgcgatcgtctcgatccccacctgatcgcggagcatagccactgatgccgcagaagatccaactggaacagatctcgcttaccgctgaccgaccgctggtcagcgacgtctccttcaccctgcgccgcggccaggtgctggcgctgctcggcagcagtggttgcggaaaatcgctgacctgcgccgccgcgctgggcctgctgccgcccggcgtcaggcaaaccgccggccgggtgcttctcgacggcattccggtgcacggcgaacagctgcgcggggcgaccatcgccaccatcatgcagaacccgcgcagcgcctttaacccgctgcagaccatggccgcgcatgcccgggaaacctgccgggcagcgggtcgtgaaacgaatgacgccgtgctgctggcagcgatggaggaggtcggtctggacaatccgcgggcgctgctgaagcgctacccttttgaaatgagcgggggcatgctgcaacggatgatggtcgctctcgccctgctcagccgcgcgccctttatcatcgccgacgagccgacgaccgatctcgatgccatcgcccaggcgcgcatcctcgacctgctggcggatattgtcgccaggcgcggtctgggactgctgctggtgacgcatgacatgggcgtcgtggcgcggctggcgcatcacgtaacggtgatggagaacggtcgcctcgttgaacactgcgatgtgaatacgctatttagcgccccgcggcacccgctcagccagcgcctgctggccgcgcatctggcgttatacggtctggagaaaacaccatgaatttactcagcgtcaccggggtgagtcacgattatcctcaccacggcagagtcctgcacgagatacaactcgccatcgcccccggcgaaacggtggccctgctcggacgcagcggctgtgggaaaagcaccctggcgcggatgctggtgggtctggaaacgccgcagcacggcgatattgcctggcgcggcgcgccgctggccgccctgaagggcgaggccatcggcgccttccgccgcgatattcagctggtatttcaggatgccttcagcgcggtgaatccgcgcaaaacggtgcgcgagatcgtcagcgagccgctgcgccatctgttgtgcttgccgcgtgaggcgcgtgcgcggcgggtggaagagatgctgctggccgtcgacctcgcgccgtcgctgctcgataagcgcccggcgcagctcagcggcggacagctgcagcgcgtctgcctggcacgcgccctggcggtacggccgcagctgttgatccttgatgaagcggtttcaaatctcgatctgctgctgcaggcggagattatcgccctgctgaagcgtctgcaggcgcagtttgacaccgcctgcctgttcatcacccatgacctgcggctggtggagcgcttttgccagcgagtgctggtgatggagcacgggcgcatcgtcgaaaccgcaacggttagtctaccgctacgcctgcgctctcctgccggacaggcgctccagcaggcggtgctccccccttttcctgccactctgcttaacgaggccatgccatgcagcgcgtaaccctgacccttgatgatgacctgctggccgccctcgatgcgctcagcgcccgccgcggctaccacaaccgttcggaggcggtacgcgatattctgcgcgacgccctcaaccaggatcctccgtcgccggaatcacggcgcgggtatgccgtcctgtcgtacgtgtatgaacatgaaaaacgcgaactggcgagccggctggtggccacccagcatcatcatcacgatctctccgtcgccacgctgcatgtgcatatcagtcatgacgactgcctggagattgcggtgctgaaaggtgatatggccgaggtacagcattttgccgacgacgtgattgcccagcgcggcgtgcgccatgggcatttgcagtgtttagcggatgattaattatttgaaaattcttgggtggtttatcaacagttgataaaccacataaactatacgctttgtgaattatccctcttcgccaataatggcgcctcatttaacgatctcgttatggcgaggctcctgcataaatacaagttaccgccctgttggtatcgagagagaccactcagggaaatacaggcttccatcgaatcaaggtgttgccaaggtaacttctggcggtcatgaccgttcagatacgttatgcagtgctaaaaccaggacgtagggatctgcctgcgctaaccctgtcttgttcgcccctatgagtgattttttatagggatttttaaacatgtcttccattcaactctgcgccgcccatcaggcgacctctggcttcgacggcgatgcgatcgtccagtacatgcgtaccgattttattacgctgcaggaacatctcagcgttcatgaggcgcgcgaacactttatctcccagctggccagcgatgatattcccgggcaggtgtttgtcgtcgccggcaagaagctgcgtggcagcctgtcggtcaaaaagctactccaggaaacggatatcaaccagtctatccgccacctgatggacagctgcctgtttcgcgtcaaacctgacgatgagcgccagcaggtgattgccgagctcagcgagcgcggcctcgacctggtccccgtcgtcgataaaggcgagctggtcggctgcctgatggagaaggagatcgcccatctgctggaggatgacgtcaccgaagatgctcagctgcagggggcaacgctgccgctggaaaaaccgtacctcgagatcagcccctggacgctgtggaaaaaacgctcggtgtggctgctgctgctgttcgtggccgaagcctacaccagcagcgtactgcagcatttcgaagaagccctggaatcggccatcgcgctggccttctttattccgctgctcatcggcaccggcggcaacagcggaacgcagatcacctcgacgctggtgcgctcgatggcgctgggggaagtgcgactgcgcgatatggggcgggtgatccgcaaagaggtatcgacctcgtttctgattgccctgaccctgggcctggcgggctgcctgcgcgcctggatgatggggattggcatggaaatcacgctcatcgtcagcctgacgctggtgtgcattaccctgtggagcgcgattgtctcctcggtcattccgatggtgcttaagcggatcggcattgacccggcggtagtttccgcgccgtttatcgccacgctgattgatggcaccgggctaattatctatttcaaaatcgcccagtattttcttgggttgaactgatcatatacgtccgggcaccagggcgcccggacgcgtagattacccttccaccagcgcctgcgcgcaggcccaggcgcttgaccacgcccactggaagttataccccccgagccagccggtaacgtccatcacttcgccgataaagtagagacccggcgccttacgcgcctccatagtacgcgacgagagttcgttggtgtccacgccgccgagggtcacctccgccgtccggtagccttcggtgccgttcggctgcacgcgccaggcggttaacgtctccaccagcgtctgctgatcgcgaacgttcagttgcttgagcgtcacatcaggtatctgtcccagctgctgcagacactccaccagccgcttcggcagctgcatcgccagggtgttcttcaggctctggttgggatgcgcgctgcgctgctcgttaaggaagtcatcaagatcgcagtccggtagcagattaacggtgacgaactcgccgggctgccagtagctggaaatttgcagcaccgccggtccggaaaggccgcggtgggtgaacagcagattttcgcgaaacagagtgccgttctcggcggtaatggtcgacggcaccgacacgccggagaggacctgcagctgctcaagcaatggcttgtggagggtaaacggcaccagccccgcgcgggtcggcagcaccttcaggccgaactgctcggcgactttatagccaaacggcgaggcgccgagccccggcatcgacagaccgccggaggcgatcaccagctttttggtcaccagcgtttcgccgttcacctgtagccggtagccttgttcatcgcgctccacgctgaggatttcgctgcgcagacggatctccacgccgcccttttcacattccgcgagcagcagattgacgatctgctccgccgaatcatcgcaaaacagctggccgagggtcttctcatgccaggcgatgccgtatttaccgaccagctcgataaagtcccactgggtgtagcgcgccagggcagatttgcaaaaatgcgggttttggctcaaataggccgccggttcaacatacatgttggtaaagttgcagcggccgccgccggacatcagaatttttcgccccggctttttgccgttatccagcagcaggacgcggcagccaagctggcccgcctgcgctgcgcaaaacattcccgccgctccggcgccaacgacaatggcatcaaacctttccacaccgcgttcctcgttccccaattgtcgggttttgtaaatatttcactctggtcacaccagcgggaaaaatcccgcattagatacatcattgaaagatataggattactcccaacagggtaaaacctaaacaggaagaaaatcaaaaaaagtctatatttcactttgcccgcgccgctaaagtcactgataatgcgccgcgttcatgtcctcaaaatggcgtaacgtcctatgctacatttatttgccggtctggatttacataccggactattattattgcttgctttagcttttgtactgttttacgaagcgattaacggtttccatgataccgcaaacgcggtggctacggttatctacactcgcgcaatgcgctcacagctcgctgtggcgatggcggcgctcttcaacttcttcggcgttctgctgggcggtctcagcgtagcctatgccatcgtgcatatgctgccgaccgatctgctgcttaacatgggttccgcacatggcctcgccatggtgttctctatgctgctggcggcgatcatctggaacctcggcacctggtacttcggtcttccagcttccagttctcataccctgattggcgccatcatcggcattggtttaaccaatgcgctgatgaccggtacttccgtggttgatgcgctgaatatcccgaaagtcatcggtatttttgcttcgcttatcatctcgccgatcgtcggtctggtgatcgcgggcggcctgattttcctgctgcgtcgctactggagcggaaccaaaaaacgcgcgcgtatccacctgacgcccgcagagcgtgaaaagaaagacggtaagaaaaagccgccgttctggacccgtatcgcgctgatcctgtctgctattggcgtgtcgttctctcacggtgctaacgatgggcagaaaggcattggcctggtgatgctggtgctgatcggcgtcgcgccggcgggtttcgtggtgaatatgaatgcctctggttacgaaatcacccgtacccgcgatgcggtcaacaacgtggaaaccttcttccagcagcgtcctgaactgctgaaaaaagccaccggcgtcgatcagctggtgccttctccggataccaataccgcggccaatggcgagttccactgccatccggcgaacaccatcaacgcccttgaccgcgtcaaaaccatgctgaccggcgttgagaactacgagtcgctaaaaccggaacagcgcggccagctgcgtcgcatcatgctctgcatctccgacaccaccgacaaggtggcgaagctgccggatgtgagcgctgacgaccagcgtctgctgaagaaactgaaaaccgatatgctgagcaccatcgagtacgcgccaatctggattatcatggctgtcgcgctggcgctgggtatcggcaccatgatcggctggcgccgcgtggcgaccaccatcggtgagaagattggtaagaaaggcatgacctacgctcaggggatgtcggctcagatgaccgcagcggtttctatcggtctggcgagctacaccgggatgccggtttccaccacccacgtactctcctcctcggtagcggggacgatgctggtggatggcggtggtctgcagaaaaagacggtgaccagcattctgatggcctgggtgctgaccctgccggcagcgattatcctttcaggcgtcctttactggctctccctgaaactgatttaagcgttattcgttcaaaacgggccagcttgctggcccgtttttttattctgaaacgttagtgccagatcatcagcgcaatcaggctcaccaccaccaggccgcacagggcgctggtcaggataaactggcgacgaacacgttcgcagcgacgaataaattcatcatcgtgatggtcacggtagcgctgggcatagatataccacaccagccgcatctgtttgctgggctgcccgtgcgaggtaaaaaagccgccgccatcaacatactgatagagcaagggatcgcaaccacgtagcaccaccaataatgcacgcaacgatgagaagtagcgtgccatattcaccacacaaacgacacacagggcccaaaacagcgcaatagtgctgatcatacctcctccccggcgacccgcctacggagaaaacctccgcggctaccgctccccaaataacccacgacgataccgtaaagagtgcgattccgatcacatttatttttccgaccggctcattaaatagtgtaggagatccattaatttttttaccacaaggttattcgttatcaatacgtaagacggataaatttgtttaacttttaggtgaacccagtgcattgacggagtgcggggggcgctataaggtaggaaatatcttctacaatgaagtccttaaaggctaccctcccgcgaatgtagcacgcaggacgcgggcgaaacggcagcgccagctgtcaggtccaatggtcatcgacaaacttatggaaggagtaacactatggcttacaaacatattctgattgcagtagacctgtccccggagagtaaagtactggttgaaaaagccgtttctatggcccgcccgtataacgcgaaagtctccctgatccatgtggatgtgaattactccgacctctacaccgggctgattgacgttaacctcggcgacatgcaaaaacgcatctccgaagagacccatcacgcgctgaccgagctctcgaccaacgcaggctatcccatcaccgagaccctgagcggcagcggcgaccttggccaggtgctggtcgatgcgattaaaaaatacgatatggacctggtggtctgcggccatcatcaggacttctggagcaagctgatgtcctctgcccgccagctgattaacaccgttcatgtcgacatgctgatcgtcccgctgcgcgacgaagaagacgaataaccgtctcgttttatccgcgcaatacgcccgccgatgcgggcgttttttattttcgctttccctcgccatgcggcagaacttcaatccataaaatcgccattcaattagtgtgatcaaccagttattcggcgaaatatctatataataatctattccataagccaataaccgcagcatggcgagttatcagacattttcggcgcgttctggcatacgcgttcatactttttgggaaagtaatacaaggcgaaggaatatgaatacaactgcacctacgggcttgctgcagcaacctcgtccgttctttatgatcttctttgtggagctctgggaacgttttggctattacggcgttcaggggatcctggcggtcttctttgttaaacagctgggcttctctcaggaacaggcctttatcaccttcggcgccttcgcggcgctggtttacgggctgatctccatcggcggctacgtgggcgaccatttgctggggaccaaacgcacgctggtgctcggcgccattgtgctggctatcggctactttatgaccgggatgtcgctgctgaaaccgcagctgatctttatcgctctcggcaccatcgccgtcggcaacggtttgtttaaagccaacccggcgagcctgctctccaaatgctatccgccgaaggatgcccgtctcgacggggcatttaccctgttctatatgtcgataaacatcggttcgctgctgtcgctgtcgctggcgccggtgatcgccgaaaaatttggctacgcggtaacctataacctgtgcggcgcggggctgattatcgcgctgctggtctacttcgcctgccgcgggatggtgaaagatattggctccgagccggatcatcgccccctcagcctacgcaatctggcgctggtgctggccggtacggtggtaatgatttttctctgcgcctggctgatgcataacgtgatgatcgccaacctggtgctgattgttctgtcggtcgtggttattgcgttctttttccgtgaggcgtttcgcctcgataaaactggacgcaacaaaatgttcgtcgcctttattctgatgatcgaggcggtgctgttttacattctgtatgcccagatgccgacctcgctgaacttcttcgccatcaacaacgtccatcatgagatccttggctttaccatcaacccggtcagcttccaggcgctgaatcccttctgggtagtggtcgccagcccggtgctggcggcgatctacacccatctcggtcataagggtaaagacctgaccatgccggtgaaatttaccctcgggatgttcctctgcgcgctgggcttcctgaccgccgcggcggccgggatgtggttcgccgacgcccaggggttaacctcgccgtggtttattgtgctggtttatctgttccagagtctgggcgaactgttaatcagcgctctggggctggcgatggttgccgcgctggtgccgcagcatctgatgggctttattctggggatgtggtttctgacccaggccgccgctttcctgctgggcggctatgtggcgacctttaccgcggtgccggaaaacatcaccgacccgctgcagaccctgccggtctacaccaatgtgttcagtaaaattggcctggtgacgctgggcgtcacggtggtaatggcgctgatggtgccgtggctgaaccggatgattaataccccggccagcgccgaataaccgtttgagatggccgatccgcactggcgccgtttgttcagatattgtggttcccggcttgcgctacgctgagccgggcgacgattcggtagcccggataaggcgcgttgcgccgctatccgggagataccaccacggcgtaatattactccggcgtaccggcgtaaatatcaaaccgatgccctttggtcaccaccgcattcggcgtggcgacttccgccagcggcggcgcataatccgggcgcttcaccaccacccgcttggtcgccagctggcgcgccggggccagcaggccatcggcgtctaaatccggccccaccagcgactgaaagacgcgcatctctttcttcaccagcgcgcttttctgcttatgcgggaacatcggatcgaggtacaccacctgcgggcgcggggtgatatcggttaacgccgtcaggctggaggcgtggatcagctgcagccgctcctgcagccagccgccgatttccgcgtcagcatagccgcgcgccaggccatcatcgagcagcgcggcgaccaccggattacgctccagcatccgcacgcgacagccgactgacgccagcacaaaggcatcgcgtcccagcccggccgtcgcatcgacgacatccggcaggtaatcgcctttaatacccaccgctttagccaccgcttcgccgcggccgccgccaaacttgcgccggtgggccatcgccccgccgacgaaatcgacgaagatgccgccaagcttgggctcatcgcgcttgcgtagctccagatgctccgtcgtcagcgccagcgccatcgggttatcgtcatcctgctccagcccccagcgggcggctaaaacagataaggcgccgtcaccggcgcctgtttcatcaattaagcagatcttcacgtagcaatcagcctttgatcccgtaatgctccagcatcgcgtccagctgcggctcgcgcccgcggaagcgtttgaacagctccatcggctcttcggaaccgccgcggctcaggatattgtcgaggaacgactgaccggtttcacggttgaaaatcccctcttcttcgaagcgtgagaaggcgtctgccgccagcacgtcggcccacaggtagctgtagtaacctgccgcatagccgccagcgaagatgtggctgaaggcgtgcgggaagcggccccaggtcggccccggcaccacggcgacctgctttttaatctcggccagggtctcaaggattttcgccccctgctccggtttgtactccgcatgcaggcggaaatcgaacaggccgaactccagctggcgcagaataaacatcgccgcctggtagtttttcgccgccagcattttctccagcagctcctgcggcagcggttcaccggtttcataatggccggagataaacgccagcgcttccggctcccagcaccagttctccataaactggctcggcagctcgaccgcatcccacggcaccccgctgatgccggaaaccccggcggtgtcgatgcgggtcagcatatggtgcagaccgtggccgaactcgtggaacagggtgatcacttcgtcatgggtgaacagcgccggcttgccgttgaccgggcggttgaagttacaggtcaggtaggcgaccggcttctgcagggaaccatccagtttacgcatctggccgacgcagtcgtccatccacgcccccccgcgcttatgttcgcgggcatacaggtcgagatagaagctgccgcgcagctcgttgtgttcgtcatacagctcgaagaagcgcacttccggatgccacacatcgacatcggtacgctctttagcggtaataccgtaaatgcgcttaaccacttcaaacaggccgctaacggctttgttttccgggaaataggggcgcagctgctcatcactgatgctgtagaggtgctgcttctgtttttcgctgtagtaggcaatgtcccacggctgcagctcatcgacgccaaactcggctttggcgaaggcgcgcagctgggccagctctttttcgccctgcggacgggcgcgttttgccaggtcggtgagaaagtcgagcacctgctgcggatccttcgccattttggtggcgagggatttatacgcatagctgtcaaagcccaacagctgcgccagctcgtgacgcagggcgaggatctccgccatcaccgggctgttatcccatttcccggcgttcgggccctgatcggaggcgcgggtggaataggcgcgatacatctcttcgcgcagcgcctggttatcgcagtaggtcatcaccggcagatagctcggaatatccagggtcagcagatacccttcctgctctttggcctgcgcctgagcctgagcggcggccagcgcgctttccggcatgccggccagatcggcgacatcggtcaccagcttgttccagcccatggtggcgtcgaggacgttgttgctgtactggttgcccagctcagagaggcgcgcggcgatttcaccgtagcgtttctgcgcctccggcggcaggccaatcccggataattcaaaatcgcgcagcgcgttatcaaccgcttttttctgcgcggtattcagcgtggcgtagttatcgccatcgcgcaggtcgcggtaggctttatacaggccttcatgctggccgacccaggtgctgtactcggagagcagcggcagcgtctgttcgtaggcctcacgcagttcagggctgtttttaaccgaattcagatggctgacaggcgagaagatgcgtcccagcacatcgtccacttccgccagcggctggcaaagattttcccagctatacggcgcgccatgcgccaccgcgctttccaccgcggcccggcaatcctccagcgctttggtgaccgcagggaccacgtgctctggtttgatcgcagaaaaaggcggcagggagaaaggcgtcaataatggattggtcatatgcgctgtcctgttgaaaagggtgaatgaagcgcgcgtccggcgcttatgcatgagatctagaatgggggatagttgggggaatttcaatgacgggcggtgcgtcagcctgggtattgctgcgataagtccgcccgttgccggaaaagcgcgacacgcagtgcagcgtgccggaaaccacattaatgccttttttgcgccatctcccaggccgccgacagattcagccgctgccagaattgctgttcgggggtggcgccggatagcgggtaacccgccggcagcgcggtgttgaccatcagcgcccgacgctgggcagctgacagatgcggcagggcatcttccagcagcacttccgccccctccggcacctgtaaacgcggctgcggacccttctgctgcggcagatcgtaggtcatggtgaagcgagagaaatcacgcatcgccggatcgcgccagggatcgtctttcacgctgctcttcgcgcactcggcaagcgatgtgccgcaggccttcgccagcgcggcgcgcagctgatcgcgggcttcgttaaataatacccggtagtgcggatcgttaagatagtgggccacgttgcgctcggccaccattcgcgagccgatcacgtccagcgggtagtggacgcccagcacgatgcgcgagaagccatagcgggcgccgcgcgccaccagcgcgtcgtagcgctccgggatcatcgccgccagcagcagcgcatcggtatagccggtgttggtgtggccgctggggaacgagccgccgtcggcggtgtagggctggttatctttcaccaccacatcgtcaggcaccaggtgaatggtgttgccctgcaccagaaacggccgcggattgttgaagtgctttttcgcctcgccggtgctgacctccgaggctttgatcaacgctgccgctttccccagcgcgccctggtcataggcggtcagaaacgctttgccaaggcgtggccccagcgcgtcgctgaggaagtagaggtagctaatgccttccgcatcggccagcgcctgacggcgcgtggtctgcacggcgtcgcgattgatggcggtcactgtcgccagattctgcttcacgacggtctccggcagggtactgaacgccgacagcagcgcaatgcccgcctgctggttggcccgggtctggaagtcatagccgctggccttcagccaggcggtatcggcctgagtttggttttgtttggtgtgcgccagccgatcgcgggtcagcgtggcggcatccccctgcagagcgtggcgtagctgcgccagcgcctgttgctcaagatcgtcatacgcctggctggaggcagccggcgtcacgctattggcgagggccgccgccctgttcagcgggatgtctttagccagaaccggttgcgccagcagcagcgcgacggccagcagcgagagttgccttttcattatttttccttttattcaaataattaccttgcctgtacccgacactagcgcggccgtttgacgtttttatgacagcgttatgttttgcaacgcttttagcagaaatgaaacagcgcggcggcgcagcggtaatctcggccgatctgcggtaaactatcggttaacttgtttacttcccggaatctctgcatccatgctcagttatcgccacagctttcacgcaggcaaccacgccgacgtcctcaaacacaccgttcagagcctgatcattgaatcactgaaagagaaagaaaaaccgtttctctacctggacactcacgccggcgcgggccgctatcagctgagcggcgagcacgccgaacgtaccggcgagtatcttgaaggcatcgcccgcatctggcagcaggacgacctgccggcagagctggagccgtatatttcggtcgtagaacacttcaaccgtaacggccagctgcgctactacccgggctcgccgctgattgcccgccagctgctgcgcgagcaggacagcctgcagatgaccgagctgcacccgagcgacttcccgctgctgcgcgctgaattccagaaagacagccgcgcgcgcgtcgataaagccgatggctaccagcagctgaaagccaagctgccgccggtatcgcgccgcggtttgattctgatcgacccgccgtacgaaattaaaaccgactatcaggcggtggtcaccgggattaacgaaggctacaaacgcttcgccaccggcacctacgccctgtggtacccggtggtgctgcgcgcgcaaatcaaacgcatgatcaaagagttagaagccaccggcattcgcaaaatcctgcagattgagctagcggtgcgtccggacagcgaccagcgcggcatgaccgcctccgggatgatcgtcatcaacccgccgtggaagctggagcagcagatgaataacgtgctgccgtggctgcacagtaaactggttccgaccggcaccggccacgccaccgtcagctggatcgtaccggagtaatcgcaaccatcggtggaaccttttaagcctcgcgctacaatcgcggcaatcaacgattaaggacatatgggcatgagcaaacattatgattacctcgccatcggcggcggtagcggcggtatcgcctcaattaaccgcgcggccatgtacggccagaagtgcgcgctgattgaagccaaagagctgggcggcacctgcgtcaacgtcggctgcgtgccgaaaaaggtgatgtggcatgcggcgcagatccgcgaagcgattcatctttacggcccggactacggtttcgataccaccatcaaccattttgactgggagaagctggtcgccagccgtagcgcctatatcgaccgtattcatacctcttacgacaacgtactgggtaagaataaagtcgacgtgatcaaaggcttcgcgcgctttgtcgatgcccacaccgtggaagtcaacggcgagatcatcaccgctgaccatatcctgatcgccaccggcggccggccgagccacccggatattccgggcgtcgaatacggtattgattccgacggtttcttcgaactgccggcgctgccgaagcgcgtggcggtggtcggcgcaggctatatcgccgttgagctggcgggggtgattaacggcctcggcgccgaaacccacctgttcgtgcgcaaacacgcgccgctgcgcagtttcgatccgctgatcgttgagaccctggtggaagtgatgaacgccgaaggcccgcagctgcataccaatgcgatcccgaaagcggtggtgaagaatgccgacggcagcctgacgctggagctggaagatggccgcagccagaccgttgactgcctgatctgggcgattggccgcgaaccggcgaccgacaacttcaatctggcggcaacgggcgttaaaaccaacgataaagggtacatcatcgttgataaattccagaacaccaacgtgccgggcatctacgcggtgggcgataataccggcgccgttgagctgacgccggtcgccgtggccgcaggccgtcgtctctccgaacgcctgtttaacaacaaaccggaagagcatctggactacagcaacatcccgaccgtggtcttcagccatccgccaatcggcaccgtcggcttaaccgagccgcaggcgcgcgagcagtacggcgacgacgccgtgaaggtctacaaatcttccttcaccgcgatgtataccgccgtgacctctcaccgtcagccgtgccgcatgaagctggtgtgcgtcggcccggaagagaagattgtcggcatccacggcatcggcttcgggatggatgagatgctgcagggctttgcggtggccctgaagatgggcgccaccaaaaaagacttcgacaacaccgtcgccattcacccgacggcggcagaagagttcgtcaccatgcgctaagacgcgatcgccggatgataaaaagaagccccgggggcttctttttttatgctcaggccacgccgttattgccatggcgcataaacgccgggcgctgattgagcgccatataccagcgctccacggctggcatctccggatgggcgaaaggggtcattttccagcgatgcaccgacagccccagcacgatatcggccagggtgaagcgctcgccggctatccacgccccggtacgctgcagctgcgcttcaacaatgcgcacgcagtgggtccaggcggcaatactctctttaatcgccaccggatcctgaaagcgcggatctttacgcaccagccccataaaagcatggcgccaggcagtgttaaactcggtcgcctgccagtccatccagtgctccacctcggcggcgggctgcggttcggcgggcagcagatcccagcgctccgctttgcgcgccagatagcggcagatactgttcgactcccagagcacgaagtcatcgtccagtagcaccggcaccaggctgttaggattcagacgctgaaactcaggcgtatccaggggcttaaatccgctgccgtaatcttcctgctggtacgccagcccggcttcctcgcaggtccacaacactttccgtacattgattgaagagcgtttacccagaattgttagcatcgtcagcgattcctcagccataaaagacagttcattcactctactctattgccagccagcaacaaggcagagcgctggataatgtgtatagttgattccagcctgtttgccgaaaaggaacccgacatgttgaccccttttaccgttttgatgcctgcaaatattcgttttggccgtggtcaggccgagagcgccgccccctggctggcgcaacagggcggcccaatcctgctggtgcatggcgccagcccgcagcgggcggcgtttctccgccagcagctggagacgctgcagcttgcggtcacgacgctggcgataagtcgcgaaccctggcttagcgatatcgagcagggcgtccagctggcgcgcgagaaagggatcagagcggtggtcagcctcggcggcggcgcggtgattgacgccggtaaggcgattgcggcgctggtccccgccgccggcccggtgatcgactatctggaggtggtgggaacgggccgtcagctggaagccagtcccctgccgttcgtggcgatccccaccaccgctggcacgggcgcggaggccaccaaaaatgcggtgatcaacgttccggaacagcagcggaaagtgagcctgcgcgacgaccgaatgctgcctgacctggcgattgtcgacccggcgctaaccgacaacgcgccgcggagcatcaccctgagctccggcctcgacgccctgacccaggtgatcgagccctggctctgcagccgggccactcccttcaccgatgctctctgccagcaggcgatcccgcggggaattcgcgcgctaaaaatcctgatggaacaagagtgtccggccagccgcgacgagatggcctgggtcagcctgtgcggcggactggcgctggcgaacgccgggctgggggtgatccacggcctcgccggcccgctgggcggcctgagccgcgcctcgcacggcgccctatgcggcagtttgttgccgtttggcctggcgctcaatgagtcgcagatcaacgaccctggcctgcgccagcgcgttaacgatgtccgccgctggctggccgacgggctggacgtccctgtggatcgggtctgggacagtctgcgggaatggagccatcgcgctggccttggcaccctgcgcgacctcggcgtagcgcgcgatgcgctggaaccggcggcgctggccgccagcacctcctcatcgatgaaggccaacccggtcagcctgagcggcgaacagctgctggagatgctggaggcggcgtgggagtgagcgccccgggataaaattttgttgcataatgaatgctccgaatttcatctgcgccaggatgtacaatttttaattacttatcaacagcgtactttgaaatggcagcttttcttctcggcggaaaagcgtgatctcacgcacagtttgcttcacactcaccgaagcgactgtctacgcttaatagacaaggccgggtatgcccggccccgaactcacgctatccggaggtccgtatcgctatgttcagccagaaattacgccacgttgaagacgacgagttaaggatcgacatcgatccctgctacgaagccgatccgtacgaattaaagctggatgagatgatagacgctgaaccggagcctgaggtgatcgaggggcttccggcgtccgatgccctcaccccggcggatcgctatcttgagctgtttaccaacgtgcagaaatcacgcattttcgcggacagcaaaaccttccccgactgcgcgccgaaacacgatccgctggacatcctgcggaactaccgcaaggtcaaacgccagcccgacttcgatctgcggcagttcgttgaggacaacttctggctgccggagagccagagcgacatctatatctccgaccccagcctgaccctgaaagaacacatcgacaagctgtggccggtgctgacccgcgagcctcaggatcatatcccgtggtcatcgctactggcgctgccgcaggcctacatcgtgcccggcggtcgctttagcgaaacctattactgggactcttatttcaccatgctggggctggcggagagcggccgggaagatttgctgaaatgcatggccgataactttgcctggctgattgaaacctacggccacattccgaacggcaaccgcacctactacctcagccgctcgcagccgccggtgttcgccctgatggtcgaactctttgaagaggatggcgtgcgcggcgcgaagcgctatctggaccatctgaagatggagcacgccttctggatggacggcgccgagtcgttgatcccgcaccaggcgtatcgccacgtggtgcgtatgccggatggctccctgctcaatcgctactgggacgaccgtgacacgccgcgggatgagtcgtggcgcgaagacgtggagaccgcccgacactccgggcggcccgccaatgaagtgtaccgcgacctgcgggcgggcgccgcgtccggctgggactactccagccgctggctgcgggatatcacgcggctggccagcatccgcacgacgcagtttatccccatcgacctgaacgccttcctgttcaagctggagacgaccattgccaacctctccggcctgaagggcgatcgcgagacggaggcggccttccgccagaaggcccaggatcggcgggcggcggtcaaccgctatctgtgggatgatgagaacggctgtttccgcgattatgactggcgccgtgaacagctggcgctgttttccgcagccagtatcgtcaccctttacgtcggcctggcgacccacgaacaggcagaacgccttgccgatgcggtgcgggcccgcctgctcacccccggggggatcatggccaccgaatacgaaagcggtgagcagtgggataaacccaacggctgggcgccgctgcagtggatggcgatccagggatttaaacgttacggccaggatcctctgggagatgagattgcctggagctggctgcagacggtcaaccacttttacaagcagcatcacaagctgattgaaaaataccatattgccaccggcgtcccccatgagggcggcggcggggagtatcccctgcaggatggctttggctggaccaacggcgtggtgcgccgactgattggcctgtacggtgagccaacctagtcgggctgttcccggcggctttctcctgctatgttcagaggattcgccctgcccggaacgacgcttatgcctgaacttctgacgccgcgcctgcgctgctcaccgctgcagctggacgactggtcgttttttctttccctgcagcaggatccgcaggtcatgctctacgtcgccgatccccgaccgcaggcggccatccgcgaggcgttcgattcgcggctgccgccgtggacgcccggggatgaacactggctgtgcctggtggtgcgcgacaggctgacccataccccgctcggcctgaccggttaccagcatcatcagcgcgacattgccgaggttggctttctcttcgccccggcggcgcagggccggggctacggctacgaatcgctgcgcgcgctgtgcgactacgcctttaccaccggcggcgtccgccgcctgaccgccagcgtcaccgccggcaacgaggcgtctaagcagttactgctcaaagccggcttccggctggagggagagctgcgggaaaactactggctcaacggacgctggcacaacgactggctgttcggtcggctgcgtggggagggcgatgcgccgtagcgcaccgccggtcacaggctgggggcagtcaggatcagaggaacatcccacccgagacttccacacgctgcgcgttcatccacgccagctcatcgctgagcagggcggcgatggcgtcgccgatatcatcaggcagcccaacgcgccccagcgcagtctgggcggcgatatgccgattcacctcggcgttatcgcgcacctccccgccgccaaagtcggtctcaatggcccccggcgcgatgatgttcaccgatatcccccgtccgcccagctctttcgcctgatagcgggtcagaacctccatcgcccccttcatcgcggcgtaggccgcatagcccggcagggcaaagcgcgccaggccgctggagacattgaggatacgccccccatcctgcaggagaggcagcagacgctgggtcaggaaaaacggccctttgaactggatattcatcagctcgtcaaactgcgcttcgctggtctcggcgaagggcgcgttgagtccgatcccggcattgttcagtaaataatcaaaggttgtgcgtccccacttctgcgccagcacctgcgccacctcgctggcgaatgcgtcaaatgttgtggaatcgccgacgttcagcgctaatgctgccgctttgacccctttttgctctatttccgccaccacgtcgagggccgcctggcggttgctgtgataggtcaaaagaatatcggttccctttgccgccagcttcaacgcggcgtttttacccagaccgcggctgccgccggtcactaaagcgatacgttgtgtcatcagaagacccctttcaggttgcgttgtgattgtgttgtagcttattaactgctcatgcaacaataaatacgctatattgcgttttactgtttcattaacaacaacaataggcgatcggcatggataaaattcatgcaatgcagttattcattcgcgtagcggacctggagagcttctcccgcgccgccgagaccctggcgctacctaagggaagcgtctcgcgacagattcaggccctggaaagccatcttggcgtgcggctcctgcaccgcaccacccgccgggtccagctcacccaggatgggatggtctactacgagcgggcgaaagatctgctgagcaacctcgacgaactggacggcatgttccagcacgatccggcgagcatcagcggccggctgcgggtggatatgccggtcggttttgctaaaaaaatggtgatcccgcatctgccgacttttttacagcagtatccgggcatcgaactggagctgagcagcagcgatcggctggtggacgtgatccgcgaggggtttgactgcgtggtgcgcgtcggcgcgctcaaagactcagggctgattgcccggccgctgggcaagctgacgcaaattaactgcgccagcccggactatctggcgcgttttggctatccgcaatccctggaggatctggcggatcatgccctgatccactacgccagcaccctcggggtccgtccccccggctttgaggtaatgatcgacggcgcggtgcgctgggtaaaaaccggcggcatattgacggtcaacagtacggaaacctatcaggcagcctgtatcgccgggctggggattattcaggtgccacgcaccggcgtgcgcgaggcgttacgcgccggcgacctgattgagatcctgccccagtaccgcgccgagccgctgccggtctcgctgatctacccgcaccggcgcaatctctcccgccgggtaaatctgtttatggagtggctgggcgggcttatgaaagcgtatgtcgattgagcggcgcggccggaaaacgggcggcggggagaggcattcctgcaggatacggcatttaaggtatactttttgctgaatctcgctgtaaaaaaggaagaaattacgtatgacgccggaaaacgacgatcgacgcccgccacaggaaccggatacgcagccggagaaaagcaaaagcacgctcgaggccctcaatgacaccgccgtcgggcaaaaagccagccaggcgctgaagaccgtcaccggaacggcggccaaagtgcagcgcaacccggtgatcgcccatctgttgcgcgccgcagagcgcttcaatgaccggctcggcaatcagtttggggcggctatcacctatttctcgttcctgtcgatgatcccgatcctgatggtctcctttgccgccgccggcttcgtgctggcctggcacccaaccctgctgcaggacattttcgacaaaattctgcaaaacgtcagcgacccaacgctggcggcaacgttgaaaaacaccatcaacaccgcggtgcaacagcgcaccgccgtcggtctggtcggcctgctggtcgccctctattccggtattaactggatgggcaacctgcgcgaagcgatccgcgctcaatcgcgcgacgtctgggagcgccggccgcaggacgaggagaaaatctgggtcaagtacttccgcgatcttatctcgctgatcggtctgctggtggcgctgattattacgctgtccatcacctccgtcgccggctccgcccagcagatgattatctccgcgctgtatctcgacaacattgaatggctgaaacccgcctggcggctaatcggcctcgccatctcgatttttgccaactatctgctctttttctggattttctggcgcctgccgcgccatcgtccgcggcgcaaggccctgtttcgcggcacgcttatcgcggcgattggctttgaaatcataaaaatcgtcatgacctggacgctgccggcgctggtgaaatccccgtccggggcggcgttcggatcggtgctggggctgatggcctttttctatttcttcgcccgcctgacgctattctgcgccgcgtggatcgccaccgcggagtataaagacgaccggcggatgccgggcaaaacccaccgctgaggtattgcgaggatgaataaaagaggcaaaattcatcctcgcgcttgatttcagcagataaatccagcatgtaacttttatttaactcaaaactggttttattctctatctttttaattgtgtgaagcatttcatagaactatttttactggtgtaaaaattatccgctttttgcctcttttttgcccattttccgcgtttgttacagattgaaatgtccctgtggctgtggctatatggcttttcgttcgcgcaaaaataagaaagatctatgcaagccacagccacaactctcgaaaacacgcaggaaaccgccccggtcaactcacgcaacaaggttgttgtcgcctcgctcattggcaccgccattgagtttttcgacttctacatctatgccaccgccgcggtcatcgtcttcccgcatatctttttcccgcagggcgatgccgctgcggccaccctgcagtcgctggccaccttcgccatcgccttcgtcgcccggccgatcggctccgcgctgtttggccacttcggcgatcgcgtcggccggaaggtcaccctcgtggcctcgctgttaaccatggggatctccaccgtggtgatcggcctgctgcccggctatgaaatcattggcattgtcgcgccgatgctgctggcgctggcgcgtttcggtcagggccttggcctcggcggggaatggggcggcgcagcgctgctggctacggaaaacgccccggcgcgcaagcgcgccctgtacggctccttcccgcagctgggcgcgccgatcggcttcttcttcgccaacggcaccttcctgctgctctcctggctgctgaccgaccagcagtttatggagtggggctggcgcgtgccgtttatcttctctgcggtgctggtgatcatcggtctgtatgttcgcgtctcgctgcatgagaccccggtcttcgccaaagtggcggcggcgaaaaaacaggtcaaaatcccgctgggtaccctgttgaccaaacacgtccgggtgacggtgctgggcaccttcatcatgctggccacttataccctgttctacatcatgaccgtctactcgatgaccttcagcaccggcgcggcgccgaatggcctgggtctgccgcgtaacgaagtgctgtggatgctgatgatggcggtgattggctttggcgtaatggtgcctgtcgccggcctgctggcggacgcttttggtcgtcgcaagagcatgattatcatcaccacgatgattattttgttcgccctgttcgcctttaaaccgctgctgggctccggcaatccgctgctggtcttcgccttcctgctgctgggcttaagcctgatgggactgacctttggcccgatgggcgcgctgctcccggagctgttcccgacggaagtgcgctacaccggcgcgtcgttctcctataacgtgtcgtcgatcctcggcgcttcggtcgcgccgtacattgccgcctggctgcagggtaactacggtctcgcggcggtcggcacctatctggcggcgatggcggcgctgacgctgatcgccctgctgctgacccacgagacccgccaccagtcgttgtgatccttcgccctgacgcccccggcgtcagggctctcctctactttttcatctgcgacaaaatggtccgacactggttgctatcgccctccgccggggagatcagcgccagcagcgcggcggccggcgtcaccagggttgccagcgccgccgctaccgcgccgcggacaatcagcggcccggccttcacccccgcctgcggcgatttaaaggtgccccggacatacagcggggaacgcagggtgatcacccgaaagcctttgctttccggatcgatggtcaggtccagctgctcggaggcgaagctggcggtcccggtcacattgatcagcgcgttttctgtatcgaaggcaaaaatctgcggccgggcgacgccgttggttacgtcgatattggccgcggcgcagttcacccgaacctcctcatcgccaaaaatctggccgatcaggtagttaccgacgttaagaccgaggatttccatcaggttgcgactgatcagtccgtcgttcatcagcagcttcaggttaccgttgctgttgccgagcagggccgccaccgagttgccgctgccgcgcagctggacgtcgccattcatctcgccgagggttttctgcatcatctcgacgtttggcatcagcgccttcagcttcaggcgtcgcgcctgcagattggcctcaccctgcagcggctttttatcaccctgcaggtgtacgctgccggcaatcgacccgttggccaggccaaagcgcaccggctgcaggcgcaggtcaccatcctccagaatcacatgggtcgacagatcgctgatcggcagggtgccgccgtgctcaattctccggcccttaaagcgcacatcggcatccatcacctgccacttgtcggtttcaaagcggtccgccggcagcactttacccgccggctgcggccggtcatccgcctggcgcgcagcgcttttcttcgtccctttgccggaatcgacgccgattaatggcccgaggtccgccagacgcagctgcttcgactccatatcgccgctgagtttcggccgcggcttgccggtggtgtaggtcagggagccatgaatgtcgctatcgccgattcggccgttaaaattctgatagttaaagcgcatgcggtttttttgcgtaaagtcggcgcgcaggcggccgtcggtggagaatgacggcgtctccggcagcagcacgccggtcaggtcatagagatcgcgcagcgagtcgccggcgaattttagccgcaggtcaatgccgccgacgttgagcgggtcgctgaccgtgccgctgaacgctacccgggtgttaccggagtggaagtcgccctgcaatgggaagggggcgcttgcgctgcgcagggccagcatgccgccgattttcccgttgccggtgaccggctggcccttgtagcggcccttcagcgacagaccaaagacatagtcgcctggtttcgccgcgctatggcgatcctttgtgccggtcacttcgctgaacggcagcggtttgccgaggggatcgacgaggatggtgatatcgctgcgggtgatcttgtcgtcaatggcgatagtcccgcgatcaaagagaatattatcgaggcgaaaggaccagctggagggcgcgctgtcgtccgaagtacgcttatcgcccgccagctgaaaggtccagttattgttgtcttccgccaggcggatcaaccgtacgtcgggctgctccagcttgatccacggcaggtacaccgttttgctcagcagcgccagcggggcaagggtcgcctccacccgcggcagatggatcatggtcacctggggaatggccggcgggttgcccagcacgatatcctccgcgtgtacgtggggccacgggatccagctgcgccagccgcgctcgtccggctgccgctcccagaccacgccgagatcgccgcggatggcgaacgggcggttaagttcggcggacactttctgattgatcgtcggcttcagccggttccagtcaaaggtggccagcacgataaagaaaagaacgatcagcaatagtatcgttcctgtgatgataaccaacgttttacgggttctgctcatccctactccgctccttttgcatcacgtcagtcctgaatatagtcaaaaagcggcgtttatcctggaaatgcgcttttcgtcacattacgcgcgtcaggtcaaaaaaataatggaacgatgttttaatatgattgaccagcaaaacagcgcagcgcacactagcgcttatatcgattccattgcaggttctggctatgtctaaaaaaattgccgttattggcgaatgcatgattgagctgtcagagaaaaacggggccgttaaccgcggctttggcggcgataccttaaacacctcggtctatatcgcgcggcagacggatgccagcgcattgagcgtccactacgtcaccgccctgggaaccgatgcgttcagccagcagatgctcgacagctggcaacaggaaaacgtcaacaccgatcttatccagcggatggccgaccgcctgccggggttgtattacattgaaaccgatgacaccggcgagcgcaccttctactactggcgcaacgaggcggcggcaaagttctggctggagagcgatcgcgcggcggcgatttgcgaagagctggccactttcgactatctctatctgagcggcatcagtctcgccattctcagcccggccagccgcgacaagctgttcacgctgctgcgtgagtgccgcgccaacggcggcaaggtgatcttcgacaacaactatcgtccgcgcctgtgggccagccaggcggaaacgcagcaggtctatcaggaaatgctcgcctgcaccgatatcgcgtttctgaccctcgatgatgaagacgcgctgtggggagaaaaaccggttgctgaggtgatcgcccgcacccacgccgccggcgtggaagaggtggtggtgaagcgcggcgcggatgcctgcctggtctcggttagcgggcaaccgctgcgggaagtgccggccgtcaggctggccaaagagaaggtggtggataccaccgccgccggagactccttcagcgccggctacctggccgttcgcctgaccggcggcgatgccgaatccgccgccagacgcggacacctgaccgccagcacggtgatccagtatcgcggggcgatcatcccgcgggaagcgatgccgcagtaattctccgcacaaagcgctctccggccgccgctggcgcgccggagaggcgttaggttactgccccggcgggatgtcgctggcctcgctgtgggcgtcaaccgtatcggcgctgccgctagccgccgtggccgccggattcggcgccatcagtttttcccaggtggcctgcagttccttcatattgtattccggttcgcccttcggctgttgcagcaccagcgccatgtcctgcgagagctgctggcgcagatactggttcagcatgtccaccgtcagggagttgaggaactcctgacgcagcttctggtactgctccggcgcgatgtccaccacctgattctgcagggagcgcatgcgctggctcatcagaatgtcggtgtcagtgcgcgcataggtggcaaacagcttctgcagctcgaggcttttctgagcgataagcgcgtcaaactcctcctgaggcagcccgttgtcccgcactttcgccagctcgcgcgaaaccacgctcaggttgttgttcaggcgctcgcccggggaatcgatgttgatggcgcactgcgcgcgctgatatagcacccggcagtcaaagccaaggccaatatccttcacgttatttttgcccagactctgctgcacgtgccagaacagcgcttcacgggcgagatcgtcacgccagtagcgctgcagcgccgcggagtcgcggatcggctgccatggcgcatcccacatgatggacagtttgtcctgacgcaccgcgttggtcatgatgctgaccggcacggtaggcagcggcgataaggtcggcaccgctgcgggggtttcccgcttgcccttcagatcgccaaaggtcttattgatttgctcggcaacgctgcggctgtcgacattccccaccacgatcagcgtcatggcgtcgggggtgtaccatttttgataaaagtctttcagctgcgccacatcgatcggctgcttcagcggcgcggcggggtcatggcccagcatggtggaccctttcaggcgatagcgccaccaaccctctttggtatccagtggccaggtcgccaccatgtcgctgccctgcagcgcatgattgatcgattcaggcgtaatggccagtttaccgctggcgtccgccagccagctcagcgcctctttcaacagatcgttgcggttattgggcaggctgagattaaacatcgtgtaatcgtaggagacgatggccggcggcagaggacgcttcgggtcaatactctgctgccataaagagcgcgcctgcatcgtcggcaggctgccgctttgcgtcaacgccaggcggggaataaagcggctgaaaccgctctgctgagtgctttcgctcagcgagccaatattgacggacaaacggacttcgatacggtcgctgggacgttgcggcgtggccaatacctgccacgataaaccattcgctaaggtcccttgttgccaggccggatcaggctggagcgcttctgcctgcacataaccggccgccgctaccatcagcaaaccgcccgttaagagtttaattgttgtgccctgcatgtgaacccctgatgaacattcctggttacaacagcaccccactgacgggctgccgaaaaaagtgagagtgaaatacgtcggttagaccacacggagacgaaaatgtcgcatgacaacgtaaaataatcatttcgtgtcattcccgccgggcgggaatgacctctaattatgcgcaggaggccgtactccagcaagggagtacgggcctaagaggaggatttaagaggataattcgtgcgttttgttcgccggaacacggttattcagaacgtcatccatctgtttggcatccagttctttcacccatttcgccaccaccaccgtggcaacgccgttacccaccaggttagtcagcgcgcgggcttcggacataaagcggtcgataccgaggatcagcgccaggccagccaccggtaaatgcccgacggccgagatggtcgccgccagcacgatgaagccgctgccggtcacccctgccgcccctttcgaggagagcagcagcaccaccagcagggtgatctgatggaaaatatccatatggctgttggtcgcctgggcgataaagactgcggccatcgtcagatagatagaggtgccatcgaggttgaacgaatagccggtcgggatcaccaagcccaccaccgatttgcggcagcccagcttctccatcttgtcgagcattctcggcagcgccgattctgatgaggaggtccccagcacaatcagcagctcttcccggatatagcggataaatttgaagatgctgaagccggtggcccgggcgatgctccccagcaccaccaccacgaacaggatacaagtgatatagaagcagataatcagctgccccagctgcaccagggtgccgacgccatatttaccgatggtaaaggccatggctccgaaggcgccgatcggcgccaggcgcatgatcatattgataatgccgaagataacctgggagaagctttcaatgacgttgaagatcagctggcccttgctgcccagacggtgcagggcaaaaccaaacaggacggcgaacagcagaacctgcagaatgttgccgctggcgaaggcgccaatgacgctgcccgggatcacatccagtaaaaaggccactaccccttgatctttagcctgctcagcgtacaccgccaccgctttcgcatcgagcgtcgacgggtcgacgttcatcccggcgcccggctgcaccacgttgacgataatcagaccgataatcagcgcgatggtgctgacaacttcgaaatagagcaacgccaccgccccggtacggccaacggctttcatgctttccatcccggcgatccccgtcacgacggtacagaagataaccggagcaatcaccattttaatcagcttaacgaaggcgtcgccaaagggtttcatttgcgcgcccagttccgggtaaaaatggcccagcagaataccgatcgctatggccgtcagcacctggacatagaggcttttaaagatagaggttttcatagggtgtcctttgggaataaccacagagcaagaagggatatttgacgtctgtggcttaaaaataacaccctggaaacatttcagaaataactaacgccgaaagtgcaacgcaattgttaaaatctttgagctgactcgcacaagtcaacaaaacatttacaaattttcatcctcccgaaccggggagagatagcgcgcgctgaatgcctcctgcggcaaagcgcaaccgaacagatggccctggagcacctcgacgccggcggcttgcaaccagcggcgctgggcgtcgttctccaccccttccgccacgatacgcagcgacaggccgcgcgcgagctggatcatcgccggcaccatgctgacatcctccggcagcatatcgatgaataccttatcaattttcagaatatccaccggcagggccttcatctgctgtagctggtgcaacccggcataacccatgccaaaatcatccagcgcaatctgcaccccggcctcgcgcagcgggcgcaaccgggccatcacatcctgcggatcgtccatccggcagctctccgtcacctcgaggatgagggtacccggggcgatgcggtagcgggcgatcagcttcagcatctcctcgccgcggtcatgctccagcagctggagcagcgaaacattaaccgacagcggcagcataatcccctggctttgccaggccgccagctggcggcaggcctcttccattacccagtagccgaccgggataatcagcccgcaggactcaatgcgctcaatcagcgccggcggtagcgaccagctgccatccgcctgccgctggcgcagcagtacctcggcgccgcagatctcgccgctggcgcaggccacctgcggctgcagccagatcgcgaactgctggttatcgagcgcggtcataatgtcgtgctcttccatcaggcggcgctgagccttttccatctgctcgggatcgaagaactcgatctggtttttgcctttacgtcgtgcggtgacggcggccgacaccgcgcgccggtaaaactgctcggcgctgagcccggcgtggaacatggcgatcccgacgctggcgtagggccgcagctgcagcccatgcagcggtaaacgctcattaataatagtgagcacttgcttacttaacgtcaccgcctgccacggttcggcaaggccatcggcgagaatcgcgaagtcatacccgctcacctgagccagcaccatctgcggcgggatcgcggcccgcagcttctccaccagcgtcaggagcagcatttcgcgctgactctccttgaggaccccggcggcgtcctgcagggtttcacaggcgacgacgatcagcgcggcgctctgcgggcgggccaccgtctgctccagcatcgccagcaaaaaggctttattcggcagctcggagaccgggaagcgggtcgactggatggacagctcatcatgctggcggaccaggctctgctggttgcggttatagctgcgcaccagcataccgatctcgtcgtcatggtgcaggcgcgggagggtcagctgatggccaagacgctcctgctgggagagatcgttcagctcgcgggcgatacgccgcagagggcgaaccatcagccggttgatgcaccaggtgagcgccaccgtcagcatcagcaccagaagtaagtaagcagtcactaacgtggcaagggcgctcatgacgaatttatacatgcgataggagtcggcctgcagcaccagataggccagcggctgcgggttggccggccgctccagcgaataaatgggcagcgaaatctgcaccggcagctcaaacagccgggtgacggttaccggcaccggccgctcggggataaatcgcatccgcagcgcctggaactggttcggcaataccacatccgcccggctgacgatgccagcaggctggatacggcttaaaatggcttccgcttccggaatatcggctttcagaatagccgcagacagcggttcgcgaacggatcgcgcgatactttctaactgcgtggccgtggtaaagcgactctgttgcacaaagtgaaacagcaaaatagtgcaaaaaaccaatacaaaggccatggacacgctcgcgaccatcgccatctgtttgattgtaagtgaacggctgacgcgcaacggtgttctccactgatactgaatacatacccggtatcaatccttcaatcccggtcgtttcaggctgattatatacttaaatccttcgcccacgcccgcgagggatgaagtgacgggatatttccgcgcggtggcgcggacgccgggatacatccccgacggccaacggtgggcaacgcctcacgagtatacgcgaagcgcgtcgcggagtggcgctctgtaacgtaattcagcctattctgctaccagtcggcgtagggcaccagcggctggggcggcatatccagatccccctgccagccggccgccgagtagcggacgtaaagcagcgcatggctcggggtgtaatccttcgcctgctgaatatcgaccgcggcgccgacgaaccagttgctggtcacccgccgctccaccagcgctctggcggtgtaaccgaatccatggctgctgcttccctcctccgtcagctcgctggcgcgctgccggtagtcggacgggatcaggttcagcagcggatagcgggcttgcgtctgggtgcgcgaatgggaccatgacaccgacccgccgagctcccaggaccagttctcggtgcgctgacgccaggtcaccggcacggcgaacgagagatactcctgtgggctgtaatagccgccctggccgagggtgtagccgctgagatctttgtcgtagtgccagatcatattgttgaggccgacggtgacgcgacgattattctcgttgatgaccttgtagtagtacccggtcatccagcgcacgcgccagttatccgccacgtttttaccggtcagcgagtcggcgcccagcgaggaccagatgccgtgagcctccccgcgatcgtagctcaggctcaggccgccgccgtcggcgcggacgccgccccaggtggcgccggtatggctgctgctgtccttctgcccgccaaaggagagcagcgagctggagataggccgccggtggacgttgaccgtgtaccccaccggcccgacgtcgctgctgtagctcagcccccccaccacatcgacgacattgaagcccatcggcgtggtgccgatatccccgctccaggtgtcattcttccagccgaccgccacgctggccccgctgtcggtctgatttttactgccgctggtacaggcgatctccccgcaggtgccccagctgggcgagtagctcccgtcgctgtgggtggaaaagctgccggcatccatattgaccagatcggtgcgaaagaacatccggccatccgccagcggagcatccacctgcagcatggtggtatgcgccttcaggtcggaatagccgccggtgccgctggaaccccagaagtcatgttccagggtgacgttcagatcctgctgacgataaaggtcggcggcatcgctgcggatcccacgcttcagccagtcatcatggctgtcgttgcgcgtcagccgcgtaaaagtatcgttatcctgcggctgcgcgggggtaatgccggaggccaccatcgcttcccggtagtgcgtcagcgcctgctgcggcgccccgctctgggtggcaaagcgcgcagcatcgcgcagcaccagcgcgctctccatcgagggcggctgcgccttcgcctgcggcacaatctgattaaaaatccgttgcgcgtcagcggtatcgccaaggccagctcgcgccagcgccacccgccgctgcatgttcatggattcggtctctgcgcctttcagctgcatgacctgcgcccgggcggccggtttatcgccctcggccaggtagacttccgcaaggccgaggcgcgcatcgccgttgtcggcctcctgacgcagcacccgctgatagtcggcaatcgccgtctggctgtcgccgcgctgctgcgcccagtcggccagcgtcagatcatagcgcaccgaggcgggttgccgtttgatgagggcgatcgcctgcgcttcgtcgccgctgtcgcgcagctggttggcctggcgcagcacccggtcgctttgcaggcgcgcttcgagttcacgaatgttatccgtccacgcgctgcgcggcagagcggcgatttgcgccagagccagatcgtcctggtcgttccccgacaggtagagtcccgaggcgtagacccgttcggcgtcctgcggctggcggttgaccatcgtccgcatcagcgcgtcggcctcctggcgttcgccagcgctgaccagatcccgcgccagacggtaggttatccagacgctgtccggatccagcgccaggcgccgacgctgaacttccgccgcctgcgcccagttgccctggctctccagagcctgcgcctgtttctccagccggtcgttagtcaggctgcgctcaatatcatcgatactgcgccgctgagcgggagggaggccggcgatccaggcgctggctttctccggcgattcggcgcgatagaggttggccaggccgcgcaccgccaggttattgccgcgatccaggcgcaacgcctgctggtaatagcgctccgccgccgcctctttgcgcgccgccgcgacatcccccagccccagcacggcatagctgtcggtgcgatcgacccgctgcgcctgggcataatagttctgcgcctgcgaaagctggccggctttcagggcgttatccccctgctttatcagcagccagtagcggttagtttgcagcaggctgtcccacttgccgcggttcgggctgtcagggtccatggcaatcgctttactgagctgcgccactgcccgcgcgcggtcgccgcgctgggaataggcctggccgagagcgcccaccgcgtcgctgtcgcggctgtcggcctgaacggctttctgcagatccgcgaccgcctgcgtggtattcccggacttgaccgccgccagcccttccgagcgggcgcggaaagtcggatcctgcagctgcgcctgctgttggtcgagcagaacgcgggcgttcgccgccaccgagccggtgggaaactgcagaagaaattgctgcaacgcctgcacgctggccttgctcaccggcatgcttttcacctcactgaaccacatatcggcggcgataccgcgtcccgaggccgatcgggccatctccgccagataggcgaacccctcctgcagtttgttatcggcgaacatctgcttcgccagcgaagtcagcaggctgacgttgcccggcgcgctggcgttcagttttttcaactggctgacgccttcgctatggcgggacggcaggcgcgccaccagcgtccagtattcaatggcgacgtcaacgtcatccggcaccccgccgtacagtttttcataggcggcgatggcttcatcgaccttcccggccacgcccagcagtcgcgcctgctgcagcgcctggcggccctcgccggtgttgcttttcatctcattgcgcgacgccttcagctccggggagtccggcgccagcttcgtcagtcgttccagctctttttgcgccccggcggcatccccctgacgcagcagatagcgcatccgcgcggcaatcagctccgggttgttgggatcaatcagctccagacggtacagcgactggcgcaccaggtcttcacgattgctggcctcgccgaggcggacctgctccagcagatgctcctgggcaggcgtcgtcgccgcctgcgctaacggcagcagcgcaacgccgagggacagcgtgagtaaacttagtgagagcttgcgcattcctggttccagtcaggttgtaattcaccactcgccgtgaaacgaaaacggtgttgatcccaaccctggccgaacagcgtcagaactgcgctgtagtaggcatccgcgccgggatagttatcggcgacgcgctggcgttgcaccgaccgggcctcgtcgtcctgtaaaaacggcagcattgccgcggagaagcccactggcccctgaccgctggttttgccggtggcgatattcactttctccgggggtactccctgctccgtggtctgcgccgccatcggcgcgaagcgttgcagcagacgcgctttctgcttatcgccatcatggagcatgcccacccacaagtagacgcgaatcgcgtcatagctgccgatcggcggcttttcggttttcagctgccagcctttccctttctcatagcgcacccagtccggggtaaagcctttcggcgcggtctccagcagcaggcgcaggttactgtcgcgcagagcgggccacggcgcgccaaaacgcacaaagtaggtggccagctgcggcggaagatagctggggttaaaccgccagccgctgtcatcggcaaaaccgacttttcccggcagcagcatcgtgccgaggcccggcaccgccaccgtctcttcagcgacaatccgcgccagcagggcttttccggtctcggtgtactgcggctgttgccacaggcggcccgcctccagcagcgcccaggctatccacagatccgagtcggacgccgagttgctgtccagcagggtccactgctcatcgtcctttttgccccacagccagcccggcaaatgttgtttcagatcgccttccgccaggttgttctgcgtccaggtcagcagtttgtcgaaccctgcgcgatcgttggccgccagggcgaaaaacaggccatagctctgtccttccgaggtggagattttgcgcgcatcgctggggtcaatcacccgtccctcggggctgacgtacgcttgtttaaactgctcccaggcgggccactggcaggcggcgcccacctggcccgccgccagcagcagcgccgagagcaccgcgccacaaagaactttcatcatggtttactcatcatccaggctaagacggcggcggctgatgatgcgcagcatgcgccacagcacccatgccagcagcacaatgctgatggcagcgaagatcgccagcagtatcgggtggttagagagcgcgaaccagatgcgctcgaaccagggcagatgacccacgtagtaaatatcccccacccgcagactgttgacgccggattcgcggatcaccgccaccgagccaaacatcgctgcccgcttaccgctgtcgttgagggcgttggtcagcagttcattaccgcgcgggctgtcggccagcagggccaccacgctgcgctgatcgttatacggcgactggaagccaatcaccgccgccatcggcccggaagaggtaatgtcggtgcgggtattgggcgtgcgggcctcatcgtcgggataaatgctcgccaggtcatagtggcgcatcggcattttcacccagcttttggtcgcctcgaccagcaggttgattttggtgtcgtccttgagcgacgacgggatcgcgccgatcagcagcagatccgcgtctttattcttgatctggttgccatcgtcggtcatttgcagattaatcgccgccagaccggtctgcgaaccgatgccccccagcgcctgcagcagcgtcgccacctggccctgggtcggcgccttcggcaccaccaccagcgtgtcggaaaggtccgccatacggctgtaagggaagcccgcattggcgaagacgcgcaggtccggcagggcgataaagtgataatacttcgagaagtcgatggtcgaatcgtcgccaatcaccacatggttctgcaccggctggaaggtaatacagttgtcgatggagccgccgggcatcgggttcatatactggaagtcaaagcgcagctggttgaccgccccaagacgcagcgcggggatggtgacctccgatttgccgtccagcagcccctgcagcaccggcaggcgcaggatcagtttgttcacgtcctgggagctgttaaggctgaacgactgcaggaactggtcgttgaggctgatatccatccgcgagctgtccttcaccggcggcatggtgtagcggtatttcagatccatatcgatgccgttggcccgcagcagatagagatccggcggcaggttaagcgccacggtgatggcatccggcaccaggccgctggactgcagctgttgctcataggttttcagctcagcgaaggtgaccgagcggtcggtgcgcacccagttcggcgcgtcgtaaggctgacgcggctgcagggttttgatgccgtccacggtgacgctgctgccgcggaacagaatattgccctgagcaatccccttcgccgccagcagcaggtcgttatcatcgcggccgaaaatcaccagcagcttgacgtagggatcgttcgggttgtcgatcatttcgatggtcggcgccttgaccggcggatgatcgcgcaggaagtccggacgcttgtcgttggtggcgaagacaatggcgttacgatccggcagttcattgaaatagaccgggaactgctggccgcgccagccggccttgctgccgaaccaggaggcgactatcgccgccgcctgctgctgggtgaccgctggcgagcccgggaaaatcatcggcagcttcagcgggcggttatcgcgcggatcgtagaacggcaccgggaagtgtgacagatcgttatttaccttcagcgactggtaggtgagatccagatagctttcgcgtccgacgtccagccacagcgtactgctggccgggttttcgcagacgtcgcggtagtggccgacaaactccagccgtacgcggttgaagtcggtgatgtacagcgggtcaatcggcagctgcgcgcggatctttttccccagctgctctttagtgacgggcaggacgcccatcagctcatcgttaagatagaccttcaactgcgactgcacgggcagcagcgagggcgatggggtgtattccagattgagcagcgcgttggcgaccagctcatcgctgcgcatgccgaattcgaccgacgcgtcaggccgtgagccgcgcagcacgatgctgccgggcggcggcgcgatggtggcaaagctcagcttcacctcccgctgcggcacgttctcggccaccgccgccggagcggtcggttcggcgagggtcgccgtcggctcgcccaccacgatcggcgcagccggggtcgcggcctgcggctgaacgccaggggcagcgttcgccaccgcggccggcgccgcgtaagaggccagtggataccagctgcacatgcccaccgctactgcacacatccaggaaagttttcttttcatcgcattatcatcattgttgagccattgccgggtctgcggagagcgtcggcgcggcgcgttcagggcgtcggggtacaaacgacgctatccaggccaccagcgaagtgagcgcgcggaaaaccaccttcaccgacggcggcgaaaactccgccaggtgacgatagccacgaaagcccagcttgaggatatccagcaggctttccatcggcttatcttccgggaagctatcctgccaaagcgcccacgtatcagcgcgggcaaacgtacactgcacaaaatcgatatgctgctggttggttaacggcagcagctggagccccacttcgctgccgttgacccgcgcgaccctgaccgggaaggcatactcctgctgtccccgtttgagcagcagcctggcgttctggccttccagcacctgcgcgtcgccgttaattttgatccccagtccgccgtcggaatagtcgtggacggtgcaggagaacaggtggccatcttcgcgggcgatagccgccggcatgctcatttcgacacggtgcgaacggcgaacctgcttgctttcaaccgagaccgccaccgcgccgccaagaataatcaggttgtagaatacccagacaatactcacccagacggtgaggatttcattttccgggccgtacatgaagcgccagatccccaccgcgacgccgaccagattgagcagcaccaggtagatatagggccgggagatcacccagtcgacatactcctcttccaccagcccgcccttcgcggtgacgttgaacttgcctttatgcgggttgatcagcgccacaaaagtgggcggcgcgatataccaggccagcaccgtctcgtaaatttcactccagaacgaatggcgatatttgccctgaatcttcgagttggtcaggctggcgtggatcatgtgcggcaacacgaatagcgcgatcatcagcgctggcgcataaatgatataggcatggagcagcaaaaaggccagcggcgccgtgaggaagatgaggcgcggaataccggagagaaagtgaagcatggcgttggcgtagcagacgcgctgcaccagcttcaggcctttgccaaacagcggattatcgaggcggaatatctgcaccatcccgcgcgcccagcggatgcgctggccgatatgcgcggataaactctccgtcgccagccccgccgcctgcggaatacgcatataggcggaggtatatccccgccggtgcagacgcagcgaggtgtgggcatcttcggtcaccgtttcgacggctatcccgccaatttcatccagcgggccgcggcggataacggcgcaggagccgcagaagaaggtggcgtcccacatgtcgttcccgtcctgcaccaggccgtagaatagcgtcccttcgttcggcgttttgcgaaaacgaccaaggttgcgctcaaagggatcgggcgagaagaagtggtgcggggtctgcatcatcgccagctctttctctttcaggaaccagcccatggtcatctgcagaaacgagcgcgtcggcacatggtcgcagtcaaagatcgaaacgaactcccctttggcatatttcagcgcattattgatgttgccggccttggcgtgttcgtggctggtgcgggcgatatagtgcaccccaacatctttggcaaactggcgaaacgcttcccgtccgccgtcgtcgaggatccagatgttcagcttgtccttcggccagtcgatgccctgcgaggcgtaaatggtgtttttcaccacgttgagatcttcgttataggtggggacgaagatgtccacagttggccacaaatccatgtcctccggcagcggcaccggctggcgattcagcggccagaccacctggaagtagcccagcaccagcaccacccaggcgtaggtctctgcgaacagcagaatgatcccgcacaccagacttaccgggtcgttccagttcagcgtcgaggtatagcgccaccagatatagcggcacgacaccgtcagcgacagcacgatcagcatcagcgccgagaaacggcccgggatgcgtcgcaccagcagcgccacgccccacagcagcatcaggaagataaactgcgacagcgggttaaagggctgcgtaatacacatcagcgccagcaccagcgagcagaaggtcaccccccaaggatcgcccggcgcagtttaggattgaggtgcgccagctctttctgtttatccagatggccggtccgggcgttcatctgctcaggcaatttttccagccactgcgtatagcgaccgtgcaccccttccagcgccgccagcgaacgccagttgacctttttctccggctccggcacgcgcgtcgtcagtaaccacagggattgcagcaggtagcgcagcggatccagcggacgcgggcgatgcggatttatgtggggaaaataggtttcatggcgggccagaatcgcctgccagcgcggcgtctccagcggcatcagcgcccagaccagcgacgcccacagacagccaagcgacgccgacagccacgaagcgccgtgctgccgatagtcatcatagcgcgcacgcagccgctcccccaccggcggggccagcagcagcgtactgaggcggatcatgccgctctcccggcggaatagtggatcaggcaccagttcgccagggtcagcacctcttccgccgccagcgaatcctgacgatactccccaagaggttgtttcgccgccaggcactcggccatcgcctcgtcgcggtgaatcgtcaccggcaggatgcgcggctggctctccagccacagctggtagagatcttcctgcagctggctgccgacccgcagatcgttaatcagaatatcgccgttggccgggaggggctgctggtgtagacggatatggctattggcgtcgggatgaaccaccaccagcgagcgatcgcaaagcgtcagcagctcgcgagtcaacggcgaataacccgccggcagatccagcagcagccagcggtactggccctgtagctgctgtactgcctccgctatcgcccccagggtgggctgcagctggtcgacattttctctttcgccggcgctgagctggccaaacggcagtagatcgatatgctgcgtatagcgcaagcccgcgtcacgccagtcccggccgtcgagcagcgcccgcgcccagccgtcctgatgatggatatcggtattaaagaaaaagcgcagcatattatccgggctggcgtcgatcgccagcacgctttcaccgagcaattgcagggcccaggcgagtgcagccgtaatggacgtgacgccagttcccccgcgcacgccctgtaatcccagaatagccatctccggcttccttattttttctctgcaaactctgccagcagcggccagcgcttcagcgccgcgttcagctgttcgcgcctggaaatatcatgataatcaatatccggcagggaaaatgcccggctaagcgccagaaaatcattttgaaaggtgtaccccagcgtggcgtccgtgggtaccgcaggatcttttgctggcatatctctgtccgttcgaaatttattattaaaccagaggacgtatacagctcatccttaaaagcaggtgtacatgctaaaactgatgacctttaatttcaatgttaggtttactctgtcggtttcgctagtaaacttattcagtgtcaatcagggcgcacgagggatgccgtggataatgtatttactttgggtatttcatcattatgggatgaagtgtgccatatgccggtcggcggagtatggtggctcaacgtcgaccgttatgccgatgccgtcagcctgtttaatcagacgctggccgcgcaggcgaaaaacagccacgttgccgcgctggttatgggaaaaaaacccaaggatatcatttccttagatcatactcacggtccggataatatcgcgctgttcaccctgccgaatcgcccgcaggcgctggaggaaatacaccgcgatttagtctgctccctcgaacctggcaattatttgtttattctgctatgcgctgaaaatgcctggcaaaatataaataatgaaaagttatgcgcctgggtagaaaagaccagccgctgggcgcaatatcaccgttgcgcgttcttagcgatcaattccgcgcaggatatcgatcggcagctgactcccttattacgtgagtaccgctccctttccggactggcaagtattcgttaccagggcgaccggcatatctttgatattgcctggtggggaagcgataagggtatcagcgcccaacagcagctgatggtgcaacatgatgacgccggctggcgattagcgcaggacgctgaaaccagcgtgcagccgcgcagcgacgaaaaagcgatcctcagccatgtgcgcgtgctggaaggcgccccgccgctgtcggaatactggacgctgtttgacaccaacgacgaggtcttcaacgccgggcgcaccgcgcaagcggcgacgatcctcttctccattacccaaaatacgcaaattgaacagctgggccgctatattcataccctgcgtcgccagcgcggtacggcgctgaaaatcatcgtccgtgaacaaaccccgagcctgcgcgcgaccgatgagcggctactgctcagcagcggcgccagcctggtgatccccagcagcgcatcgctctcccgctgcctgacgctaatcgaaagcgtacagaaccaaaagttctcccgccatatcccggaagattttgccaccctgctgacctggagccagccgttaaagctgcgcggctaccagaagtgggatgccttctgcgaagcggtgcacaacgtgatgaccaataccctgcttccacccgacagcaaaggcgtgatggtggccctgcgcccggcgccggggctgcgcgttgagcaggcgctgacgttatgcaaacctaaccggatgggcgacatcatgaccatcggcaataaccggctggtgctgtttttgtcgttttgccggatcaatgacctcgataccgcgctaaaccacattttcccgctgccgaccggcgatattttttctaaccgtatggtgtggtttgaggacaagcaaatcctctcggaaatcgtaatcatgcgcggcgtcgagccggcgcgctggaacacgccgctgcctctctcggtcggtaaaaacgagaccattaacgccacccacgatggacgccactggcgacgctaccccgaaccacaccggttaaccacccgcgaggagcaagcctgatgatgtctctcgccgatattctgcaactggtggtgctctgcgccctgctgttttttccgctgggctacctgacgcgccactatcagcgccggatccgcacgacgttaagactgatgttctttaaaccccgttacgtgaaaccggcaggggtattacgccggggaacaacggttaagcaaggcaaagcgaacaaatgacaaataaaaaaacgaccgcggcaccgcttccgctctggcagtactggcgcggccttggcggctggaacttctactttctggtcaagtttgccctgctgtgggccgggtatctcaatttccatccgatgctgaacctggtatttctcgcctttctgctggtgccgatcccgcgcgaaaagctacaccgtatccgccactggatcgctattccgctgggattcgcgctgttctggcacgatacctggctgcccgggccagagtcgatttttagccaggggtcgcaaatcgccggcttcagcgccagctatatctgggatctgattgtccgctttatcaactggagcatggttggcgccttctttgttttgctggtgctatggttgtttatcagccagtggctgcgcgtcaccgtgtttgtctcggcaatggtcgtctggctggcggtcagcccgctgctgccggcctttaccctatggccctccggtcagcccaccacggccgccgccacgaccgcacaggccaataccggggccaacgccgccgctggcgccgcgtccagccccgccaacagcgatattccgccgcagaccgagccgccgacctcagccaacctgaccaactggctgaacgctttctatgccgccgagcagaagcgcaagacgccgttcccggaccagctgccggcggatgcgcagccgtttgacctgctggtgatcaacatctgctccctctcctggtcggatattgaagccgccggtctgatggatcatccgctatggaagcactttgatattgtcttcaaaaactttaactccgcgacctcctacagcggcccggcggcggtgcgcctgctgcgcgccagctgcggccagctgtcgcatactaacctgtatcagccgtccggcgccgactgctacctgtttgaaaacctggcgaagctcggcttcaaccagcagctgatgctcggccataacggtctgttcggcgacttcctgaaagagctgcgttcgctgggcggtatgcagagtccgctgatggaccagaccggcctgccggtcagcctgcaggcgtttgacggctccccggtgtataaggatctggcggtcctcaaccgctggctgaagaccgaagaggccagcagcaatccgcggaacgccaccttctataacaccctgccgctgcatgacggcaaccacttcccgggacaaagcaaaaccgcagactacaaagtgcgggcgcagaagctgtttgatgacctggataacttcttcaccgagctggagaaatcggggcggaaagtgatggtggtggtggtgccggaacacggcggcgcgctgaagggcgataagatgcaggtatctggcctgcgcgatattccaagcccgtcgatcactaacgtcccgacggcggtgaaattcttcggcatgaaggcgccgcatgaaggggcgccgattatcatcgatcagcccagcagttatctggcggtgtcggagctggtggtgcgcgccctcgacggcaaaatgttcagcgaggacagcgtcaactggcagcagtatgtcgccaacctgccgcagagcgcggcggtgtccgagaacgccaacgccatcgtcatccagtatcagggcaagccttatgtccagctgaatggcggtagctgggtgccttatccgcaataagcgacaaggccgcctatgttggcggccttacatcgtgagacgttcccattccaccttctcagcccgcaggcatacgggcggggaaggcggcaaatcaatcaccgtatttagcgctgatcctgtttcgccagccagaccaacagcttgaggctggcagagtaataatcatccttgtcgtcaatctgcggcgcctcctgcggttcacccagcgtcagatcgcgcaccgccaacaggccgccggccatataccagggggccacctcgttggtgctgacgttgatccacgccggggtttgcaggcgcgggtaactctgcatccaggccttccagggcgcgagcaaggcgctgtgcggatcggcccacgagagatacagcgggatacggatcgcatcgaaactcatccgcggcggccactctttggctggcagcatcttgccatccgcccgcagcgccacccagtcgctgggtagatgtgatttcccccagcccatctgccccagcagcgcctgtccgtcgctctgcaatgtccgccaggcggtgagatgcgtccgctccgcgaaggcgcgccaggccgggaagatgaaataggaagggttaaggttcaggtgatcattgaggttgaaccctttcacgcccgggagcatcacctggcgaccggcgaaagtcaccaccgtagacttcagcagggcggcggtgatggcgtcagaggcaatcgcatagcgcttatcctgccactgcttttgcgcgcgcagcagcgcccaggcgatcagggtatcgccatcggaggcgttgtttttatcggcgatagggtccggcgccaccgggttatagcgccagtaaaacaacccgttagacttgttgcgcagggtgttgtccgtccactgccacagcttgtcgaacgccggacgatcgttattcgccaccgccaggagcatggcgaagccctgaccttccgtatgcgacacattgccattggcggtatcaatgatacgaccatccggcatcataaaacgggccttatagcgctcccaggccgtatccgcccacgccctgggcaccagcatcactaccgttgtcactatcaccgccactaaagcacgcaggggcataaattcactctttatggatggtagtagagaaactgaacgtcagagacggagaacacccgctcacgctgcagtatcacgtgggcactgcctccctgactctgcagccagcgagaatataacccctcgagtatggcacagaacgcgttgcaccagcgcacgcgccccgcttcgtcgcggctgaccggcaacgcctgatggcgcaggcgcaggccgtcctcaccgacatcgatggtcaccacgccccagtgaaaatgagtcagcagccggttgatattggcctccagatcccccaccgtctccgacgccggcagcggatgggtctccgccagcgaggcgcccatctgacgcaggaagggctggctttccagctcgccggcattatttagcataccttcgatcataataatcaacagatcgaaccatccggcaggcgtctgctgctgctgaaaccaggtcatcaccaccgggttattgttctccgtcatcatcaatgatctcctaacatatagcgaatatagagcccggcggtgctttcgttataatccccgaaggtgtcatagccaatctgaccccccagggtcatttgtttgttgaccttgtaatccgccccggcgcgcagggtataccctatgccgctcttcgaggtcgcggagtagtaggcttccttggcaaacccattgctcaccgccgtctccagggtctgctgccactccgaattggtcgggaaataggcgctcttatcctgactgtaagactgatagcccaccgagccgccgagcttcatggtccagttatcatatttctccgtcagactgaccggcagcgatacgctgacgtagttttgcggactaaagtagcccccctgaccataggtgaagtagctgaggtttttggagtaatccatatagctcatgctcaacccggcctgcagctggcggtattcgtcatggtagggacgaagatagaccccggcattggcgttgatactggtgttgctggcgacgttctgccccagatagctgtatccaccgccgccgacatagaagcccgcgtcgccgtcgtcatagctcagctgcagggtgccgccgtttttcgtcacctgcccccaggttttcccggaataggcgtctttcagacccacgtaggaaagcaggctgtcggttagcgagcggcgttcgccggtgaggatcagcgacagatagttggtcagcttgggcgaccatttcaccccgccgactacggtattaagatcctggcccaacggcgtgctgccgatatcgacccggtaatcgtcaccgcttaacgccagcgccagttcgacgccgttggccttctgcgaatcggtcgagccgctggtctggtcaacgttcggcttgcggctggacgaagagagatagctggccacctgccccgcatcatagctcccgagcttcgccaggttttccatcccgctgttggtggtcggattgaaatctgccgcgttcagggtgccgaggccgcttaacgcctcggcccctggattgctggcgaaataggccgtccgctccgcctcggtcatcgaggcgatcgccgcctgctcgctggtggcggtactcaccatgttggagaccgcgttagccagcgggttggcgccgtagcgacgccaggcgtcgccgctggcggtcccggcgttcaacgacaccggggtgacggtaaagtcaaagcgcgagtcgccaaacggcgaggatgaccaggtcagcggcgtccggagctccgtcagcttgctggtgcccgattcgccgtcgcgtccacgcacgtccattccccctgcagccagctgccggttttctcctgcagcgactccatcatggtgtccacctgacgcagcatccgcgtctgggcggtgtccaccggcagatcggtgcgctggatccccggcagcgtggaaccaggcgcggcggccgactgggcaacctgccacggcatgtactgcccgtaggcggaggccgtccgcgtcggcgccgacgtttgcgacacgccgataaaggggttatccgccgccagcaccccgccgacggtcggcgtttcgctactgttggtgctttgcatgcccagcagtttgccgcgggcgctgcgcagataggtcatcgcctgctgatgatgtccctgggcctccgccactctcgccagcagcagcaggcgatccggggagttatcctggcgcaaaccgccggccagctgttcagcgcgatcgttgttccccgccgacagcgccacgtcgatggccccggcgcgcgcatcctggttcggcgtatcgcgcgtcataaggtagtcatagaccaccccggcctctttgttcattttgccgctctggtacagccgcgccatggcgaacatcagatcggtattttgcggatcgctttgcatagcgcggatcagcttgtcatacgccgcagcgtaattgccctgctcgcgcaggcggtcggcttcgttgatcacatagccattgcgaatgctcgccagctgcgtcggcgtactgctggcctgcagctgcggattgctgatcaggttctgcgcctcgccggttagcccggcctgattcaggacggcgatctgatcggcgtaatccccggcattgccggatacgccgctgctgatattgttgcgcaccagcgagaccgcggtggtcaggtcgccgctctcggccagcagacgcgccagcttgccggcgtccgccggggcttttggcggcgtggaggccatcgcccgcagggtattgctggcggcgatggtattgccctgcgccaggtagttttcggccgtcaccaactgcaggttgtagttcacccgctggcgcaaatcgcgcatatcgctggtctggctgccgccgggaacgcgcgccagcagcgtctgcgcctgctgccaggcgccgttttcgctggcaaacagggcggcggcatacagcgcactgttgctggcgccggggcgataggccgccgacatcagcgaagaggcctcgctgccgttacccgatttttgcagcagccgggccaggtcgaggcgcagccagggatcgtccggatagcgggcgacgccttcgcgcagggtggcaatggcgccggctgggttaccgctgctgacctgcgcctgggcctgacggcgcagggcatcgcccggcataccggccaccacccgcggctgcagtttttgccgcaggctctgcgggagcgtctgcagcatcgcctgcgcctcggcggatttattctgctcgcgcagcacgtaatagaggttttcccgcgccgccgcgttctgcggatcgtcatttaacagtgagcgcagcgtttgctccgcctggggcaaatctttgttgtgccgcagcacatcggcgcggaacagcttcgccgaggcgccctgcgccccgctctgctgcgccaacggcgcggagagcgccagcgcctggctgatattgccctgcttataggcctgctgggcctgcgccagctggccgtagaacagcgcatcggccgcctgctgacgacgggtcgccgaggcgtcgccgccgaggtccgcggcccggctcagatactgcgacgcggcctggtagtcgccgctgcgctgggcgatatagcccatgcccgccagcgcatcggcatcctgggggttagtctgcaatacctcttcaaactgctgcttcgcggcggcggtattgccgctgttgaggttggcgtagccctggccgcgcgcctgaccgctgcgccgttcgcgaaagtaattctgaacttcgctgtcctggggatgccgctgcatccaggtgtcgtaatactgctcatccccggcctgcgggcccagccagagcagcgcctggcgcaagccgctgtccgcctctttattgccgctggccatcggctcgagcagggcgatcccttcccggcgagtctcttcccgccaggttaacgctttgcccaacgccacccgcggggcgttctcctgcggatgctgcgccacgtactggcgcagctcgctgatagcctgcggatagagcgatttgtcgctggccatggtcaggtaatattccgccgccagctcggcaggcggcgtattgccattgaacatgctgcgccaggtcgccagcgccccggggatattgcctccgcgcgcctgctggcgggccaggctgagctggccctgcggcacctgcgacatctttttggcgttgtccagatcctgtagtcccgggctgtcaggggccgctttcgccagacgcgcgcgccactgcgccgccgcctgcatatcgccgccctgctgcgaccagagcgccatcagatacagcgcctgggtgttgttggcatccaccgagagcaccttctgcagggactccatcgccagctcgtcatgagatttctcatgccagtagttggcctgagcgaacagcgcctgtagcgccgcgtcgttccccgccgccagcgcgccgcccgaggcagcgagagtcaacgcgccggtgaggcagaacgtggtaagccgacgggaggtcttcatcgttattattatctttcttttcattggttatcccccgaacccagacgcttacgggcgtgacgtttaaacatcgcggtcagcgccagtcccattatcgaggtggcaatcagccccagcaccgccaggaaacctgagtgctggctggcataccagaccgccatcatgtaccacggcatctgaccgctggggaacggcgtactcacctggaagctgcgcaccccgttatcgctggtgatcaccgcggtatcgccgcggatcccggcgttaatgcgcggcgattccagatcggtcttcagtcgcgccagctggtcatcattgctggccagcgccaccaccaccaggcgggtggaattccacggcgagcgatagctgatgaacccgcgccaggcgctgctcgacgaaaagtagcgatcggcgtcgaggctggcggaagtccagtcgccggtgagccggcgctggactttttgccacaggtctggctcgcggacgctcagcacattatctaccgggcgatagggtgagtcggccagcaggctctggttaaaggcctgctgatcgagagcggtgaccgccagcacgtcacgttcacgcagcgactgcaaatccccccgccggtgggcatcccgagcacgacgcggttattcgccagcgcggtgccggtcgcgttcccggagcgtgccgccagattcagcagggtcgccacctgggtttcagacgggtccgccggcagcaggagggtcgtctgcgaatagtccgccagccgcgagaaggggaacgaggcgccgacaaagtaggagagattgggcaacagcgagaagtgacgcgtcttgctcaaatcgatccaggagtcgtcagtgatccggctcttgatattgttattcagcagcaccgaacacggaacatcgtcctttggcaccacattgaagtacatcgacagctggttatcgccgtaaatcaggtaaggcgccagcgggatggtaaagcgctcctggcgcgcatcgcccccgaggtagcgccagactttctccagcggcccctgcttgttcatcggcaggttgttgaggaaggtgccattgagcgtgacgctcagcaaggacttgtcctcattaatccagctttccgacgggaagcggtagccaacctgtagcggaatggtctccccatcccacagatagagatcgggcgcggcgcggaaggcgatacgtaaaggttcgtgccagacgccgctgacggtcgggctttggtccttacgcagcagctcgctgagcttgaccggacgatcggtggggatccagcgcggggcatcatatgctttgccaaccgggatggtctgcggttcgacatccagcgtcgcggtttgcggcgcaaagttgccgcgggttaaccgccaggcggccatgcgcagcgccgtatcgtttttaccgacaatcagcagcagtttataggccggattggcggggttggcgatgatgcgcagcagcggcttatcggtttccggcagcatcatgccgcccacctgctcccccggatggccaatcacgatgccgtggcgttccggcagacggtcgcgcagagcgctgaaggcaatgccgcgatagtccgcctggatacccagccaggaggagatcagcgccgcggcgctgaagacgtccgccgacggcttggccccataggcgaccgcaatgtccgccggggtcatctgcatgctgtcaaagaagggccgcgggaagtggctcaggtcgtcgctgatgttcagctgctggctttcccagctgaaatgcgacgtgggcagcaccgtcacccgcgacgtatcatgaatgtcacgctggcactgcagggtatcgccatcgttgatcttcacgctcaggttattgctggagaccatcagcgcgggcggaatatccagctgataatgggagacatcctcgccatcggcgcccagcggcagcgtgccgagcggttgaccgttgagcatcagctgcagggtggcgttgcggctcgccatctccggcgatacgcgaacggcaaggctgagctgcgaatggatcaccacctgatcggcaggcagggtaaagctgaccccaccctgtcgctggccgccgctgaggataatcccgtccggcatccccatctgcgccagattcagatcgcctccccagaccggagcgacaggaatgacctccggcgcggccgtgccgctcaccggcgggggtaagtccggcataaccggcgcaggggccgtcgccgccgcatcgccggcggtggcgggggctgccggagaggcgccctcctccggcgaggcagccggaggttcgtcgccgggctcgctgtccgccgcgtcgttgagctgcgggaagctcagcggggcagcggcgccggagcccggttcttcactgtgtagcgcaggcgcagagagcatccctgccagcagcgccagcgtggttaatcgcttcataacgtcccatcctcctgcgccgttttcgccactgttgcccgattgcgctggctgcgacgggttttccacgtcagccagaacagttcgaacacgcagcgtaaaatggtgaagaaggagcggaacgggttatcctgcgggcgcggcggattaatccgcgcatccgcgcgggccagcaccacgcgcaccagttcacggcggcgcgaaagcggaatatcttcatcaaacttgaggcgcaggaagcgctcgtcagaggtgaccagctgggccgggatcgagatagccccggactgcaggatcagctcaatctcttcgatgtcatcctccagatggcgattatcaggcgcgaccacgcggcagccgcccatcgacaggtccgcggtatggctgcgcgagacgatgccgctggcgtaatggatcaccaccggaatatcgacatcgatacgaatggtttttcgcacctgccgcgtttcgcgcgccacggcaatcgccgccagcaggaagatcagactgtagatcccccacccgacgttgagggcgataacgttgggatccgagccaaaatagtcatggccaatcgcccggacgatgccgacgatcacccccagggccagcaggcaggccaccaccaggtgcgggcgcaccacggtgaaatcgaagtagccgacgtccagcagcccccccttatcggtaacgttaaacttgccgcgtttggggaaaatcatcgtcaccagggtcggcagcaccaggtggaaggccagcacaatatcgtagatctccccccagaagctgtagcgatagcggccgttcattcgcgaaccaacgtaaatagcgaggaacaggtgcggcagggcataggagacaatcaggctcgccgacgagtaaataatattgaggttaaacagcaggtaagccagcggggcagtgacaaacaccaccctgggcagcgcgaactggtagtagagcatggcgctgagatagcacaagcgctgctgaaaagtaagcccgcggccaaacagcggattatcgacgcggaaaatctgcgtcatcccgcgcgcccagcgggtacgctggatgacgtgcaccaccaggcgttcagtagcgaggcctgcggccagcgggatatcgagaaaggccgacttccaccccagacgctgaaacttcagcgccgtatgagcatcttcggtcaccgtttcgacggcgaaaccgccgatctgcgccagcgcctcgcgacggatcaccgcgcaggagccgcagaaaaaggtggcgttccagttgtcgttcccctgctgaatcgggccatagaacaacatcccttcgttgggaatgttgcgtccgacggagaggttacgttcaaacgggtccggggaatagaagtagtgcggcgtctgcaccagagccagcatcgggtctttcaggaaaccgccgacggtggcctgcaggaagacgcgcgtggcgacgtggtcgcagtcgaaaacgcagataagctccccctgagtcagggtcagcgcatggttaaggttccccgctttggcgtgcttgttgtcattgcgggtgatatagcccacgccgacgtcggcggcgaagacggcaaactcgctgcgcttaccgtcatccagaagatagattttcattttatcttttggataatcaatgcattgtgccgccaggacggtatcgcgcaccacctccagcggttcgttatagctcggaatatagatatcgaccgtcggccacttactcatatcatccggcagcggaacaatgccgcgcttcagcggccagaccgtctgcagatagttaagcagtagcatcacccagatatagacttccgccagaaagagtcccatgccgagaatagcttcaatggacgagttgaagtgcagggtctgcgtgaggcgaaaatacatgtaacgggtggacatcagcagcgacgtgacgaccataatgaccgatacgctgcggcgcttgctgaagcccatcagaaagagaataccgatacttaacagaccaaaaatatactgcttttggctgtccatcggcgtgatcaccaccagcacggcgacgggtgacagcaccagcgccagcaaccaaaaaagagattttttcattcagcagccctgcaaaaagttaacgccctgacatgcgtggctggctgtgcaccgtgccatcgccaatatgaatacccaacagcgaagatatttttttagccatgatttcaatatcgaaggccgctgccgaggaagcgttaaagtccaggatcgacttctgcgaggcattggcctccaccacgctttcatcacgatggatcacgccaagcagtcgctcgcccagtttctcttccatcaggctggtgacgtcccggctgacctggcgacggctatcgctttggttaatgacgaaatagtgcccgtgcttatgattcagcgccgcgccggtcaggcgctgcttttctacgtgcgccagggtcgacatcgaggcggtatccgccagcagcgggataagatgcaggtccgccagccccgtcagcgcctttagcgcgggcgaaggtccaggggcatatcggcgatggtgataagcccgggataattaagcagcgcggacagaccgcgctggaggaaatggtcattatgggtcagttgctcatcaaacgcctgacgctgcgcctcgctcacttcgccatatggcaggacgaaaatattactgccggcgctcaacacgcactggctccagtcgtgcagctccagcgccttcgccacatagccccgctcatcgttcagcggtacgccaaaatgcaaacgcagcgcgttctggacatcaaaatccagcgccagaactttgctgcccgtccgcgccagcgaataggctaaatggccgccagggtcgttttccctacgccgcctttcggtgaacagacgcaaatcaacggcatgtcgcgatcctttccagaagtgatttcaaaggctggtctttatttttcgccaccggctccgcgcttttcgcggcgaacaggtgggcatagttctcggcggcgggcgcgggtcggggggccattctcggcggcggcgccatggccggttccgacgccggaattgaaggcgcaggggtcggcgcaggctcctgcctgaccggctccggtgcggctgcggcggtctccacgaccggctgggaagtagcaggcgcggccgaagcggcagacacaacaggatcagaggttggcgccgctgctacggccgcctctacctggcggaacagatccgcaggcaccgactgcggcaacggcgcggagaccgagcctcccagcgccagagaagaggatttctcggcgccgggatttagctgattgaggatcgcccagtcgccgtgttcccgcgtggcggcttgcgaagaaagatcctgaaagttgaggttttgcgtccgcgatttttcttgaaagcgctgcagatcatcataatggttcattgataacctcatgattttaaaaatttcatattaagtttgttgttattttctgggtatattaaaaatatcgtgacgcttctgggatggcagataacgcgccgatggtgacgtaccaatacacacgattgacagggttataatagtttagaatttgattttcgggatgattccacggcagaagtatcgctacactaacatttcccttgcagaagggtagccccattttttaggtatgcgtacatccttaacttcccgcaatcaccacgcttcccagtcgtttttatataaaagtattaggtcatgatgaaatcatagcgtcagatcagcgaaagaataaacctgaaccattttaatttctctttaattctataaaaatggactgaaaggcttattttttcggataatctacgaagaatgctctgagagcgtgacataaactgcggcaatatgcgtaagcgccaggttttatccacggcgggagagaagctcccggccatgggaccgggagcgcgccatcaggcgtgggacttttgcggattctcatcctggtcgacggcaaagcaggccaccagctggccgccgtaatccttcagctgcggctggagctgagtgcaggggccaaagcgacggcgacagcgcgcgttaaaggcgcagcccggtggcggatttagcgggctcggcagttcgccggtcagcttgattcgctcgcgccggtcgtctgggttcagacgcggcgtcgccgacagcagcgcctgggtgtacggatgacgcggattgttgaagatctggtctttggtgcccttctccacgcagcggccgagatacatcaccatcacttcatcggcgatgtgctcaacgaccgacagatcgtgggagataaacacgtaggacagccctaaatcctgctgcagatccatcatcaggttcagcacctgagctcgtaccgaaacgtccagcgcggagaccggctcatcggcaatcaccacatctggatccagcattagcccgcgagcaatagcgatacgctgacgctgaccgccggagaacatatgcgggtagcgatcgtaatgctcggttttcaggcccactttcgccatcatcgccagcgctttttcacgccgctgctctttgctcaggctgctgttaatcagcagcggctcctccagaatctgccccacttttttacgcgggttcagcgaaccatacgggttctggaacacaatctggattttttgccgccgcagcttctgcgcctgcgggtcgtgcttaagcagatcctgcccctgataatagagctcgccgccggtggggatctcaatcatcgtcagcagacgaccgagggtcgatttgccgcagcccgactcccccactaccgccagcgttttaccgcgctcaagggtaaaggagacgccgtccagcgccttcaccagccgttccggggcgaataaccccttcttcaccggatagtgttttttcagatcaatggcctgcaacagcggttgtggcgtggcggccttttgcgtactcataatccaggcctcccggcatcatcgagtgggtagtgacatttagactggcggccgccggtcagatccgcgagcgccggctcttcgctacggcatttatccgtggcgtaggggcagcgcggattaagcaggcagccgttgggacggtcatatttccccggcaccacgcccggcagcgaggccagacgcgctttatcctgggcgaattccggcagcgcgcgcagcagcgcctgggtataaggatggcgcggcgcgcggaagatatctttcgcgtcaccggtctccaccacctgacccgcgtacataacgataattttatgcgcggcttccgccaccaacgccaggtcgtgggtgatcagcaccagcgccatattctcctgctgctgcagatccagcagtagctcaatgatttgcgcctgaatggtcacgtccagcgcggtggtcggttcatcggcaatcagtagttttggccgacaggcaatcgccatcgcgatcatcacgcgctggctcatgccgccggaaagctgatgcggatagacgtccagccgcgaggccggatcgggaatgcccaccaggttcagcaggtcgatggcccgctggcggcgggtttgcttattaccaccctgatggaccttaatcgcttccataatctggtagccgacggtaaagcacgggttgaggctggtcattggatcctggaagatcatcgccacttccgcccccaccagctggcgccgctctttttcagagatgcgctgcagatcgcggccgttaaattccagtttatccgccatcacccggccgggatagtcaatcagccccataatcgccagcgagctgacggatttaccggagccggactccccgacgataccgaccacttcaccctgcttcacgctatagctgatgcggtctacggcgcggaacggcgcgttttcatcgccgaaatgcaccgataatttatctacattcaataacgccatctcgaacctcttactgcttcagtttgggatcgagcgcgtcacgcagaccgtcacccatcaggttaaatgccagcaccgtcagcaggatcgccacgcccgggaaggtgactacccaccaggcgctctgcgcgaactgcaacacgtcggaaagcatggtgccccactccggcgtcggcggctgcgcgcccatgccgaggaaccccagcgctgccatgtcgagaatggcgttggaaaagcccagcgacgcctgaacgatcagcggcgcgagacagttaggcagaatattaacgaacatctggcgcatcgcgccggcgcccgctacgcgggaggcggtcacgtagtcacggttgacctccaccagcaccgcagcgcgcgtgagacgcacatagtgcgggagcgccacgaaggttagcgccagcgaggcgttgacgatggagggcccgaagattgccaccagcaccagcgccagcagcagactcggcagcgccagcataatatcgacgacgcgcatgatgattgagtccaccactccgccgaaatagcccgccaccaggccgagcaccacgccgaggatcagcgacagaaccaccaccaggcagcccaccagcagcgacaggcgggcgccgtacatcaggcgcgacagaatatcgcggcccacgtcgtcggtgccgagcagatgcgccatgctgccgccgtcctgccagaacggcggcgccagcagcgaatcacggaactgatccgccgggttatagggggcgaggaagttggcgaataccgcgatgacgatcatcaccaccacgtataccagcccgacgactgcccctttgttgcgtttgaaatagtgccagaactcctgcagcggagtcatgggtaccggcgcagcgataactttattttcagtaacttgtgacatgatggccccttacttcttatgccggatacgcgggttcaccacgccgtacagcaggtcgaccagcaggttgacgaggataatcatcgtcgccaccagcagcaccccgccctgcaccaccggataatcgcgacgctgcagcgcgtcgatcagccagcgacctaaaccaggccatgagaaaatggtttcggtcaggatggcgcccgccagcagggtgcccacctgcagaccaatcaccgtgaccaccggcagcatcgcgttacgcagcgcgtggatcacgatcacccgcatccgggtcaggcctttggcgcgcgcggtacggatatagtcttcgccaagcacttccagcatcgacgaacgggtcatacgcacgatcaccgccagcgggatggtgcccagcacgatagcgggcaggatcatatgcattaaggcgtcaataaagtcgccctgctcgccccagatggcggtgtcgatcagcataaagccggtcagcggcagggtatcgtcaaggaataccgtatcgctgatgcgcccggagaccggcgtcaggttcagctgtaccgaaaccagcataatcagcatcatgccccaccagaagataggcattgagtagccggtcagcgccaggcccaccgcggtgtggtcaaagatggagccgcgttttaccgcagccagcacgcccaccggaatgccgacggcgacggcgaagatcatcgcgcagacgcccagctcaagagtggctttaaagcgcgggacaaactcctgccacacgggaatgcggcttttcagcgagatgcctaaatcgccgtgcagcacgccccagatatagtgggcatattgctgccacagcggcttatcaaggcccatttcggccagcagctgcgcgtgacgttcgggggaaataccacgttcgcccgccataatcatcaccggatcgccggggatcatatggacgaaagcaaaggtgagaagggtgataccgataaatgtcgggatgactagtcccagacgtcggagaataaactgcaacataacccggattctctctagtgacgccccgcctggcgacagggcgtctgtattgctcacaaaagcattccccggaatagcgggaatacgccccccgcctctcccacgcggggagagggggtcaggcatcgtgcttattattcgacagagacgttatcgaagtggtgtttgcccagcgggtccaccacatagcctttgacttctttacgcaccggctcatagacggtggagtgagcaatgatcagcgccggagcctggtcatgcatcactacctgagcctgtttgtacagttcaatacgcttgttgtggtcgtcggtagcgcgggccggctgaataagatcttcaaacggcttatagcaccagcgcgagtagttggagccgtctttcgccgcggcgcagctgaacagggtcgcgaagaagttatccggatccccgttgtcgccggtccagcccatcatcacgctctggtgctcgcccgctttcgcccgcttcagatactcgccccactcgtaggtgacgatcttggcctggacgccaatcttggcccagtcagcctgaatcatctccgccatgcggcgggcgttcgggttgtacggacgctgtaccggcatcgcccacagatcgatggtgaagcctttttccaggcccgcttctttcagcagctgcttcgccttctccggatcgtaggtgtagtccttaacgtcgtcgttatagccccacatggtcggcgggatcaggttcttcgccgcctggcctgcgccctggtaaaccgctttgatgatcgcttctttgttgaccgcgtaggtcagcgcctgacgtactttgacgtcgtccagcggtttcttctcggtgttaaaggagagataaccaacgttcagacccggctgttctagcagggtaatgttcttatcttccttcatgcgcgcgatgtcggccgggttcgggtacggcatcacctggcactcgtttttctgcagcttggcatagcgcacggaagcgtccggggtgatggagaagaccagacgatcgatcttcggcttggtaccccagtagcccgggaaggctttatacagaatgcgggaatctttctggtattgcagcagctggaatgggccggtaccgataggattgagatccactttttccggcgtgccggctttcagcatgttgtcagcatactctttcgaaagaatggaggcgaagtccatggccagatcagcgaggaacggcgcttccggacgggtcaggacgaactggacggtattatcgtccactttcttcacttcgctaatcaggtccggtaagcccatcccttcaaagtattcatagctgccgccagaaactttatggtacgggttattagtattcttctggcgatcgaaggagaacaccacgtcatcggcgttcaggtcacgggttggtttaaagtctttattatcctgccacttcacaccctgacggaggtggaaagtataggttttgccatccgcactgacttcccatttctcagcaagtcctggaataacttccgtcgtaccggttttaaattcgaccaggcggttatagatcggtacggagctggcatcataggtggtgccagaggtgaagagctgtgggttaaatccttccggcgagccttcagaacaataaaccagggttttcgcttgcacgctggcggcgacggtcatggcgaccaggctcagaccaagcttcagcatccctgatttcttcaaggaaatactcattattctgctccaaaattgtgatgttgtttgcatatatccgccggacctttatttattttttacccggtccggtcggtggtgcccgaaggcgtagagagagatggggattcctttcgcaaaaacgactgagttgcagtacggattctccatgaaatgcccctcatgccctacaatctgtcaacagaatggggaaacgtcaatacagccagccgggttttacatccagcgtgagaaacggcaggcaaagattaaaaaaacttcaggacgctattttcagcagagaaatttatgctactggcaattcagcagaataaagaccttattaatttgcaacacccagtgggaaacaatgccagcaaatgagaaaaatttcttgctgtgtgaccaatatgtgagcgattaatagcgtgaacgttaaaacgcacagcggaaaatgctgcattcagccataagcttcgcgaaaaaagatctgttcatcgataaaaaaatgcaatggaagatatcacaaaatagcgaatagccggctgaaaacgtgagtaaagacgtttattgtgattttggtggtatttttggccagttgtgcactgatgatgcccggcggcgctgctggactgaccccataaagttggatggttcatattaagcggctctcagagcctgggttcggtactctaccggactcaggccttttaatttcaggcttatccgctcgttgttgtagtaatggatatagtcctctacggcttttcttagcgcactgacactcctgaactccctcagataaaaacactccgatttcagggtcccgaagaagttttccatcactgcattatccaggcagtttcctttacgcgacatactctgcgtcatcccatgcgcctttaaacgttcctgatagctcctcatcctgtaatgccagccctgatccgagtgcagcagcggagcatctcccggtctgagctttgggaacgcaccgtccagcatcgtattcaccatctccatcaccggcctttccgacaggctgtaggcgataacctcccggttaaacagatcgagaactgacgacaggtaaagcttttttccctgtaccgggaactctgtcacatctgttacccatttttcgttggcttttgacgcaccgaagttccggctcaggatattgggcgcggcctcgcccgttctccctttccaggcacgatattttttcgcccttatcacagaccggagtgacagttctgccatcagccgctgcactgttttatggtttatccgcagcccctgttttctcagtgcgagcgtgatcctgcggtagccataacgacctttgtgatagtggtatatcttcctgatgttctctttaagacccgcatacctgtccccttgcttcagtgcattcatattgtaataccacgtgctacgggacataccggccgcccgcagaaggtcccgcagagcgtgttcatgccttagttcactgattatcagggctttttgccatttttttcgctctgaaccaaggctttcaacttttttagataggcattctctgcccgcagataacgcagttcggccctgagttcttcgggggagagtttttccagctctttatctgttagtggtgggatattttttggctttgtcatttttccgggccgtccgcattgtatgtttaaaagaccttccgctccggcatcgttgtacacgtcgagccagcgccggacaagtatttctgcggagagattaaaccgggcagccgcttcacgcatcgtcaggcggtcactgataaccgcccggacgaccacgagtttaaattcatcggaataatgattattttttgcagtcaggccttctgcaccgtggaactgccatgccctgacccagcgacggacagatgttctttcaataccaaaaaggtcggctgtactctgttctccgtctttaccggacaaataatgattaaccacagccagttttgtttcaggggaatactttggtttagccataaaattgcaccttactcagttgggtgtccaacttttggggtgcagtccatgcgcttgcgcgggcctacgaaacgcgagtcgaacctcctgcccccggaggttctcatcctcactggcctcagatgcaaaaaagcctgctcattgagcaggcttttcgaatttggtcggtgatagaggatgactcaccacttcgtggctcgccctgcgggccgttgctgacgcaacgttctctcgcttcgctcgagtcgaacctcctgcccccggaggttctcatcctcactggcctcagatgcaaaaaagcctgctcattgagcaggcttttcgaatttggtcggtgatagaggattcgaacctccgaccccttcgtcccgaacgaagtgcgctaccaggctgcgccaatcaccgaatgcggggcgcatcttactgctgggatgcctacccgtcaatgccttattttcaaaaaatcgctcaaccggcgagaaactcagcagcctgagcagcgaatcgccggttgctcaacgtttttagcggcagttgacctcaaacgttttgcgatactcggataccttacatgtcaccggctcgccgagataggttgcgcccgccggggtgaatgtaaactctcccagtagcatcgtcagctcccccagctccgggcaggattgctgatgacgcataatatccgggcgggtatcgttattcaccgcccgggcgatgtcgctgtatgccagcttgtcagcaaaggcattagcacaaaactgcagttcgctttgcgccatatgcgcggcctgccccttcagctcggcatgctgtgccagcagcagctggcgaacctcgccggcccggctgtagccaatcgccgtatagccggccttattgctgaggttgacgctggcgccagccgcaagcagcgcctcgacattggctttattattcattttgaccgccagcatcagcgggctgagatcgttggcggaaagctggtccacctttgcgccgcgctgcgccagcgccgcgatcaccgcaggcgccccctgacccgccgccacctgcagcgccgtgagtccttcacggttcggctgatccacttccaccccggaggccgacagcgccagcaccagatcgggatcatcccccgccgccgccagcatcagcggtgtggtgccggatttatccgccaggctggtgtccgccccggcgttggccaacgtcgtgatggtttccgccgatcgcgcgtgatcgacagcgaggaaaaaggccgattccccggacgcgttgacagccttcacgtccgcgccgtgcttgaggagcagcgccactatctcgtcgacgttcttcttaaacgcgccgggcgccagttgtaacgccatgtcttcggtcatcagcgcgcgattgcccgtcgccagcgatttcgccgccgttgcgccaactatcttgtccagcgtactctcctcttcgacaggcgcatcgggctttttcatcgccagaatatgctgatagtcgtttctgatgtccccgccgtcggagatggcggacatcaatgccgtactcttgtcgatggaggtctgattcaccgacgctcccgcctggagaagatcgccgataatcgcggtatcgctgccacgcgccgccgccagcatcagcgccgtgacgccctggcgcgtctggaggttcggcttcgcccgacgcttaagcagcaattccaccacatcgcgtcgattttccgcagcagcgaccatcaggccgcttaagccggttttatcctgaccatccacatcaatgccgttatccagcatggctgcgatcgtcgctggcgcatcgtatttacaggccagcaggaactggctggtctcttcctcagactggcagcccgcgagcatcatcaggcacagtaggaccaacccctttatcaccttcatcctttctctccatgaaaagttcatgcacaggggaagcgaggaaacaggggtaatcaaagaagaagaggtcacctgccagacacgtccactgtgcgaaaaaaatccctcgcgcggcgtcagccggcgagggattagcttatcctgggctcaggaaaggaaaacagacccgagaatctgaaaactatcgggccttactttttccaccggcaccagttgttgttctcattgatcccgccatccggcgaggtatagccgaggcagcccataatggtgtcgtacagctcgacgtgacggcgcggcaccttcatcgcagcctgctgctgcagatgggcaaacgcggcggcgtgatcgggattttccaggtacttatccgacatccacaccatcatcggcacgcggaactgctccggcggcgccatcttgcgcggcgtaccgtgcaggtgttcacgctcgttaatcgactccccgtggtcggcggcatagaacacaatcgctttcttatcccgcagctggtcgaggacgctgacgataaagtgatcgacataggtcacgctattgtcgtaggaattgatcagttccgctttcgagcacttgttgtcgacgccgacgcactccggtttccactgggcgaagctgcgcgggtagcgttgggtgtagttaaagtgggagcctttggtgtggagaatgatcagatgcttaccggaggcgttgccctgcgccataccgcgcttcatctcatccaccagcagcatatcgtcaacgctcttaccgcggttgcgcggctcggcgccaatctgctcgcggtaggcgatattgttggccatcgtgttgctgtagaaccacatctcgctctgcatggcgtacagattgccgctgaagcccagctgatgcagcacggcaaagacattctgctctttgagcgtccgctgtgggttatcttccgccccgccctcgcgcacaaacatgcagcgtaacgacagtttggtagcggtatcgcacgagtaaccgcggaaggcgacgagattcttctctttctccagctctggcgtggtattgcggctatagccgaggatgcccatatggtcccagcgggtcgtttcgccaatgataaacaccacgtaggtatcatccagaccttccggcgcgacgtaggtgaacttcttcgccgggttaatcagcgatttgttgtctgaggattcatccacctgcgcccaggcgtacagacccagcgccgacaaccagttcgacggcaggtaagagttggcgatcaccccgccatagctcggcatatccacttccgaatggcgctccacatcatgctggcgcagctctagcaggcggatgggtccccagacaatcagtccggccagcaccacgatcagcacgtttttaacccgctggcccggggtgcgcagctggcgcagcagcgtatggcggcagcggttgctccagatgaacagcaacggcggcgcgctcaccgccaccagccagaggatcaggtgccagccgatgacctctttcgacaggtcgatatcggtggtcatcaccgaagcgatgatcccgtagccaatcaccacattgaggaacgtcatgtagtaactcgccgcggcggaaaacaggacaatcagcgtcgccagaatgcgccagatacggcggccgaacagcgacagaagacgtaacaggaagaaggtgacaaataccgtggcaaccagttcaacaacaccggaaagccctttccagaaagtgaactcttgagcataaccatcgaaacgccggaaaaaaacggcgacgttcataaaccagccgatgtacagcgccagccaaaaactaagcttctgctgcgtcatcgttctaatatatttcatgcaagcaaacctggaaaaagaagaataaaacaccgcctgacgctgtggcacgagtcagtaggctaatagggtgcgttagggttggttatcagaaacctctacaaaccgcgataagtagaccacagggaacgagaaaagtatcaggagggaatgtgatccagccaaacatttacaaaacatttggctggattggcactatttgcttagggaaataaccaggggcacgtttcacgctgcaggtttcaggcgtgcgcctcgttatataccgtgcttttcggctgacgaatggtggtggataacgccagcgagaggatcagcagggcgaagatcacgcagaaggtcacgtagaaaccgccgaacagcgaagcgatgagagagccgcagatgctgccgataccgaagcccagataaatcacgccatagtttttcgccagattgttcagaccaaagaactcactcaccagcgacgggaagacggtaatggtgccgccgaagttaaaggcgacgcaggcgatggcggcgaagaaggtcaaggcattcagcggggcgaacagcagcgcggccatccccaccagcgacacgacctgaccgatggtaatcacgcgaatgcgggagattttatcagacaggatacctaacaccaggcgaccgctgaggttcgcaatcgagataaccgttaccgcgttggccgccgtggcgacatccaggtggaccattccctgggcaatatctttcgctacgccaattacgtacagaccgctcatgcaggccgtcaggaacatcaccgccagcatccagtactgcggtttacgcatcgattcggcgagggtgaagtcgttttccacgacgccgttggccgcggtggctgccgggtgatttggcgcatctttcatcagggtcgcgccaaagacgatcatcaccagcacgatagcgccccagataacgaaggttttttccaggccaacggtggccagcaggtgggaatcaatgaatttgaaccccaggctgccgagaccataggagccaatggagaaggcggagatcaaccctttacgctccgggaaccatttcacgcagttcgacagggtcagcaggtaaccggcgccgtccgccagccccaccagcacgcccgcgctcagccacagcatcatcaggctgctggagtgcgcggtcaggaagaagcccaggccgagcaggatcccggaggccatggtgacgcgcttcacgccaaagcgctcctgcagcttgccggcgaccgacgaagagagtgccagcccgaggctcagcagaccaaaggaaaaagccacctgactgaccggctcgcccagtttgtcagacagcgaactgttaaacaggctccaggtataaaccgaaccgagagcgaattgggtgatgatggtgccgatcagtgtcagccagcgggtcgattgacggtttgcagcgttcatagcagttgtcctgataaattaactgccgccacaatagcgaaggcccctcatccagtgggggaaaaaggcatgaactgccatcagcggggaatgaaatgcattaatgttggaatgaatggcattgcataacattcattccgtaaattacaggcaaaaagttagtgtgcgctatctcacagaaatgcgccattgctgagatttaacaataaccacatcgtttcaaatgcgtaacaattcccgattaaaaattggcgctgacccccatcaaatagagcgtattttcccctgacggcaggttatccgcctgcgacagcgttgcccatgccgccacgtgggatcccaaccgcatatcagcgcccagggtgacatcgctccagcctccctccctggcacgggacatcggcgcccagacatcgctggcgagcgactggttatagctcacctgcgcccagggatgcacgccccacagcgcctgataatccatgcgccagccgagcgtgttaacgtagcccgcctcgcctgcgcttctcaccgtcggcgcggtgacgtcgctgcgcaggctggccaccggcccggaggttacgccgtttgccagcggataattccagccaatgctcaggccgcggccgctgtccggcggcgccagcccctggtttaacgccagccccccgggcgtctcagaggacttcatccgctcggcgagaatatcttcataacgtggttggtgatcgctatcccatgtatagcgttccgacgtattactttttgtatcgatagcgatatattcctgttgccaggcattcgctccagagacacatgacacccagacggatacgctcgccgggatcaagaacccccggaggccattgcatttctttattatcattaatgcgactccagaaaagagccgaatcggcaatattgctgtgtttttagtggggatacgatttccctgtattaactattatctttatctttcagccgtcaaggcgggcgtccacttttttagcgcagagggagaaacagctatgcagcgttgcggatgggtgagtcaggatccgttatacatcgagtatcacgataccgaatggggtgtggcgcaaaaagagggtcgccagctgtttgaaatgatctgccttgagggccagcaggccggtttatcgtggatcacggtgttaaaaaaacggcagaactaccgccaggcttttcaccagttcgatccggtgcgcgtggcggcgatgggtgatgacgatatcgagcgactcctgcaggataccggcatcattcgccatcggggaaaaatccaggccattatcggcaacgcccgcgcctatctggcgatggaagaaaatggcgagtcgttcactgattttgtctggtccttcgtcgacaatgcgccacaggtgacccgcgctgcgacgctggcggaaattcccaccacgacgccggcctccgatgcgctgtcgaaggcattgaaaaaacgcggctttaagtttgtcggctcgacaatctgttattcctttatgcaggcctgtgggctggtcaacgaccatgtcaccggctgcttctgtcaccctggaggtcaggatgatccgcaagtgggacactgaagataccgcgccgctgctggcgctgtggctggacagcacgattcatgcccatccttttatcagcgaaagctactggcgcgacagcgtcgcggtagtacgggatgtctatcttcccgccgccagcacctgggtctgggagcaggatggcgagttaaaaggctttgtcagcgtgctggactcccgtttcgtcggcgcgctgtttgtcgcgccgggcgccacccgccagggcattggccgggcgctgctggatgaaatcaaacagcactacgcctggctgagccttgaggtttatcagaagaacgaatcggcggtcagtttctaccatgcgcagggcttccggattgaagactgcgcatggcaggacgatactcagcacccgacgtggattatgcgttggccggcggatcaaatgccgtaagcggcagcgccgggccggtatatttctccagccacgccagggcggtgttcccggcacagccgttgcccagccgggatgtcggaatatctttggttaagacgttcaccgccccgtttttgcagatgccgacctgcggatccaggtcgggccacgctccttcatgcaggcaaatcacccccgggcggatcccctccgtcaccacggcgccggccagcacctgaccgcgggcgttccatacccgcaccaaatcgccatcgacaatcccgcgcgcctgcgcatcctgcggatgaatagtcaccggttcgcgcccggcgacggcatagcgctcgcgcagcgcggtgtggttcagttgactgtgcagacggtgggccggatgggccgacagcagctgcagctgccccgcctctgcgttgccatgccactcgtcgggctccagccacatcggatgcggcggacagtcggcgtaaccaaaagcggcgatggtcggcgagtggatctctattttaccgctcgccgttttcagcgggttggcctggggatcggcgcggaaggcggcgaaacgcgcaaaacgggcattctccggctcctccggcatctcaatcagctggttagcctgccagaattcggcaaatggcggcagcgtcacctgctgctgggcgccgcgccgggcggccatctgatagaaagtctccagccactgcaaatcactcttcccttcggtgaagcgttcgcggccacccgcctcccagcgttcgctgaggtcggcaaagaccgcgaaatcgtcgcgcgcttcatctcgcggagcaaccacctgcttcatcggcaccagatgctggttactgtagtccccggtcatggtcagatcgttgcgctcaaacgaggtggtcgccggcaggacgatatcggcatggcgcgcggcggcggtccagaagcattcggaaatgacgataagctccggtttctgccacgcctgaatcagtcggttggtgtcctgatgatgagtaaagttggcgccgccggcccaccagataaagcgaatatcgggaaagcgccgcgccatgccgttgtgctgatactccgcccccggattctccagcgcctcgacaattcgtgcgaccgggatcttctccaccgcgtccacgcctccggccacgctcccctgcatcgagcccagcaccgccgcgcggcgggtcgggttgccgccgttggcaaaatgataggaaagaccaaacccgccaccgggggtgccgatctgtcccagcatggcggccagagtgaccagcatccagtgtttctgctcgccatactgctgacgctgcatgccccagccggccatcagcatagtggtattttcgtggaaaagttgcgccagttcgcggattttatctgctttaacgccgcagatcgctgctgcccactcagcggttttcgctacgccgtcgctttcgccggtcagatagcgggcaaaaatatcgtagccgctggtgcagcgggtaagaaacgcatcatcctgccagtcattttccaccagcgtatgggcgatccccagcatcagcgcgacgtcggtgcccatatgcggcgcgatccactccatcgaatcgccaaagaaatcgacggtttccgatcgcatcggatcgatgcagatcagccgcttaccgctctggcgcagccgatcaaaccacgggatcccttgctcgtcggaggcattccaggcaattttcagcgtgttcagcgggttggcgctccacagcaccaccacttcgctgtgctcgagcaccagcggccaactggtctgctgctgatacacctcattgccgccaacgacataaggcatgatcgcctgcgccgcgccggtggagtaatcgccaagatggccggtatagccgcccgccaggctcatatagcgctgcagcagcgtcgccgccttatgcaatacgccgttagagcgccagccgtaggagccggcaaaaatggaggccggaccgtagctgtcgcggatccgccgatgctgggcatcgatcagatccagcgcctgctcccagctcacccgcacgaattcatcctgaccgcggaccccctggggcttgtccggtgaagcaaggaagcctttacgcaccattggatagcgcacgcgggttttgctgtgcacctgatcgcgcactgccgtttgcagcgagttggcaaacggtgtcgccagcgcgccgcgggaagagaggacgttttccccgtccgtttccaccagcatcggtccccagtgggcggcggttaagatggttttggttgcagatgaggttggcaagggcggctcctggtcagcgaatgcaggtgtcatgacggcgtgatgggcaaccgttcaatgttatttacaaaaagagatggtatccggggaattttctccgtaatcgcgcgtcataatcaaccgtcacgttcgctgtgacaaagaataaaaaggattaaggatattaaatgaaaaaacgcgtacttatgattgcggcgctggtcagcggcactctggccatttctggctgcaccaccaacccctataccggtgaacgtgaagcaggcaaatccggtattggcgcaggtattggctccttagtgggcgctggcgtcggcgcgctctcctcttccaaacatgaccgcggcaaaggcgcgctgattggcgcagcggccggcgcggcgctcggcggcggcattggttactacatggacgtgcaggaagcgaagctgcgcgacaaaatgcagggaaccggggtcagcgtgacgcgaaatggcgacaatatcgtgctgaacatgccgaataacgtcaccttcgacagcaatagcgccaacctgaagccggccggcgccaacaccctgaccggcgtggccatggtgctgaaagagtatgagaaaaccgctgttaacgtggtcggctacaccgacagcaccggcagcaaggatctgaatatgcgtctgtcgcaacagcgtgcggacagcgtcgccagcgcgctcatcacccagggcgtggcggccaatcgcattcgcaccaccggcatgggcccggcaaacccgatcgccagcaacagcacggcggaaggcaaagcgcagaaccgtcgcgtggaaatcaccctcagcccgctgcagtaagcgcatcttcatatcgcccggcagccgttctgccgggcaaaatgcttgatatcgctatttttcgcgctaaggtgttggcagattttcagcaaaggaagccaccatggcgaaagcggcgcgtgcaactatcagcgatgtggcgaaagccgcaaagaccggcaaaaccagcatttcacgttatcttaacggcgagaagcatctgctttccgacgacctgttatcacgtattgaaaaagccattgccgaactcgactaccgccccagcctgatggcccgcggcctcaagcacggccggacccgcctcatcggcctgatcatcgccgatatcaccaacccctactcggtcaacgtcatgagcggcattgaagcagcctgccgggaaaagggcttcaccctgctggtgtgtaataccaataacgagctcgatcaggagctgcactacctggacctgctgcgcagctaccaggtggagggtattgtcgtcaacgcagtcggtatgcgggaggatggcctgaaccgcctgcagcagtcggccctgccgatggtgctgattgaccgtaaaatccccgacttcgcctgcgatgtggtcgggcttgataacgcccaggccgccaccaccgccaccgaacatctggtggaaaaaggattcgaggccatcctgtttctcagcgaaccgctgggctcggtgaatacccgtcgcgagcgcctgagcgcctttcgcgccacgcttgcccgccaccacggcgtggtggccgaaaacgccgaggtgcagcttaacgacggcgcgatgctggacaacgtcctgcgtcagttccatgcccgccaccgcgggatgcgcaaagcggtcatctccgccaacggcgcgctgacgctgcaggtagcccgcgccctgaagcgcgtcggcctgatctgggggagcgatatcggcctgctgggcttcgacgaactggagtgggcggagctggccggcgtcggtattaccaccctcaaacagccgacgtggcagatcggctacgcggcggtcgaacaggttattcggcgcattgccggcactaacgaccccatccgcgaacgggtattttccggcgagcttatcgtccgcggatcaacctcccgttaacgatccttcgtgatgccgatcataaattaaacatctcgccctttcttatggaaccgataccatctagcgtattaaggagattaagcaacaaacgccgggagtaagagcgcgatggccagaaaaattattgtcgttaccgctgcgtatggtaatgaccatgttaaatccttaggcgggcaggccgccgtcctgccgtttatcgccaacgccggcgcggacggcgtcgaaatccgccgcgagctgtgcagcgcggaagagctcaacgctctgccctcgctggcggccaccattgagcgccacggcctgctggcctgctactccgcgccgcaggcgctgttcaccgacaacggcgagcttaacccggatctcccgacgctgctcgcggaagcgcaaaccctgaacgctctgtggctgaagctctcccttggccatttcctccacaatcagcagttggatgaactgcgcgatatcctcagcgacagcggcatggcgttggtggtagagaatgaccagaccgactgcggccagctggcgccgatgcagcgcttcaaagccgcctgccgggtccatcagctgccgatcaccttaacgtttgatatgggcaactggctgtgggttggcgattcgccggaagaggcggcacgtcatcttgcgccggcggtcagctatattcatgttaaagcggcggagcctcatcatgagaaattccgcgctgtaccgccggatcaggccgccgaacgctggctggccctgctcgataatcttcccgccgacgcgccgcgtggaatcgagtttccgctgactggccatgacctgacggccgtgacccgccgctacgtcaacctgttacgcgaggattaagtcgtggaaaatttagatgtcatcaccatcggcgaagctatggccatgtttgtcgccaccgaaaccggggatctggccgaggtggagcatttcatgaaacgtgtcgccggcgccgagctgaacgtcgccaccggcctggcgcgcctgggtctgaaagtcggctgggtgagccgcgtcggcaacgacagctttggccgcttcgtactgcaatcgctggcgaaagaggggatcgatagccacgctgtggccatcgacaaccgcttcgctaccggtttccagatgaaatcgaaagtcgaaaatggaaccgatcccattgtggagtatttccgcaaaggatccgcagccagccatctttcgccggacgattttcgcgccgactacttcaccagcgcccgccatctgcacctgagcggcgtcgcggcggccctttctgagagctcttacgcgttgctggagcatgcggcgaaggtaatgaaagccgaaggaaaaaccctctctttcgaccccaatctgcgcccggtgctgtggaaaagcgaagccgagatggtggagaaactcaaccgtctcgccttccaggctgactgggttttgccaggcttaaaagagggcgtgattcttaccggccagcagaccccggaagggattgccgatttctatctctcccgcggcgtcaaggcggtagtcattaaaaccggctgcgacggcgcctggttcaagagcgccagcggcgaacagggaacggtcgatgccattaaagtcgataacgtcgtcgataccgtcggcgccggcgacggctttgccgtcggggtgattagcgccctgctggaaggcaaaaccctgcttcaggcggtgaaccgcggcaataaaatcggttcgctggcgattcaggtccagggcgacagcgaggggctgcccactcgcgacgcgctgggcgagtaacttttctacgcaacgataacagccgtcctgtaccctacctgcagcgcggcacagcagcgtccgtttcgacggacgtatgtctcctcattgacagaggcaagcctatgaatagctcaacaaatgcaacgaaacgctggtggtacatcatgcctatcgtgtttatcacgtatagcctggcgtacctcgaccgcgccaacttcagcttcgcctccgcggcaggcattaccgaagacctgggcatcaccaaggggatctcctcccttctgggggcgctgttcttcctcggctacttcttcttccagatccccggcgctatctatgcggagcgccgcagcgttcgcaaactgatctttatctgcctgatcctgtggggcggttgcgcctccctgaccggtattgtgcataatatcccggcgctggcggcgatccgctttatcctcggcgtcgtcgaagccgcggtgatgccggcgatgcttatctatatcagcaactggttcaccaaatcagagcgctctcgcgccaacaccttcctgatcctcggtaacccggtgacggtcctgtggatgtcggtagtctccggctacctgattcaggccttcggctggcgggaaatgttcatcatcgaaggggtgccggcggtgatctgggccttctgctggtgggtgctggtgaaagataagccgtcgcaggtgtcctggctggcggagagtgaaaaagcggcgctgcaggaacaactggatcgtgaacagcaaggcatcaaagcggtgcgtaactatggcgaagccttccgctcccgcaacgtgatcctgctctgcgcgcagtattttgcctggagtatcggcgtatacggctttgtactgtggctgccgtcgattatccgcagcggcggtgaaaatatggggatggtggaagtgggctggctctcttctgtcccgtacctggcggccaccatcgccatgatcgtcgtctcctgggcctcggataaactgcaaaaccgtaagctgttcgtctggccgctgctgctgattggcggactggccttcatcggttcctgggcggtcggcgccaaccacttctgggtctcctacaccctgctggtggtggccggggcggcaatgtatgcgccttacggccccttcttcgccattattccggaaatgctgccgcgcaacgtcgccgggggcgccatggcgctgatcaacagcatgggcgccctgggctccttctgcggctcgtggtttgtcggctacctgaacggcgccaccggcagccccgcagcgtcctatatttttatgggggtagcgcttttcgcctcagtatggctgactttgattgttaagcctgctaataatcaaaaccttccacttggcgctcatcacgcctgaacgactcatactacggagattcgcatgaagccgtctgtcattctctataaaacgcttcccgacgacctgctacagcatctggaggagcacttttccgtcactcaggtgaaaaacctgcggccggagaccgtttcgcagcacgctgaggccttcgcccaggctgaaggcctgctgggctccagcgaaaaggttgacgccgcgctgctggagaagatgccgaagctgcgtgcgacctccaccgtttccgttggctatgacaacttcgacgtcgaggcgctgaacgcccgccgggtgctgctgatgcataccccgaccgtgctgaccgagaccgtcgccgatacggtcatggcgctggtgctgagtaccgcgcgccgggtggtggaagtggcggagcgcgtcaaagcgggtgaatggacgaagagcattggtccggactggttcggcacggatgttcaccataaaaccttaggcatcgtcggcatgggccgcatcggtatggcgctggcgcagcgcgcccacttcgggttcggcatgccaatcctgtataacgcgcgtcgccagcatccgcaggcggaagaacgcttcaatgcccgctattgcgatctcgataccctgctgcaggaggctgactttgtctgcctgatcctgcccctgagcgaagagactcaccatctgttcggtcaggcgcagtttgcaaaaatgaaatcttccgccatcttcattaacgccgggcgtggcccggtagtggacgagcaggcgctgatcgccgccctgcagaacggtgagatccacgctgccggtctcgatgtgttcgaacacgaaccgctggccaaggactcaccgctgctgagcctgccgaacgtcgtcgcgctgccgcatatcggctccgccacccatgagacgcgctacaatatggcggcctgcgcggtggacaacctgatcgacgccctgaacggcaacgtagagaaaaactgcgtcaatccgcaggtaaaataagccataaaaaaacccgggtaacggcggcaaccgccctccccgggttctttttgcatcctgtccatcatcctgcccgttcgccgcagccaacgtcagccagatgaagcattaacgggtggcgttcaccgccgccgtccatgcctgattaaacgcctgatgctgcgccgccagcggcccaatcagcgcattgtactggctggcctgctgggaggttgggaactgaatgccgttggcgacaaagctcacctgcgtcccctgctgagcgacaaaatccccaacctgaaccagctgctgggtaaagatctgcgcggccgggatcagcggctgcagcgcgtcggctggcgccgtcaccaccttggcgtaaacctgatcgaagaccggcttgagatcgtcagcctgcttcagcgcgccatgcgcggcatcggcctgcattttcgcattctgcagctgctggctgagcacgcccagcgcgccgttcgcctgacgcagcggctcacgctgggtcatataatcctgcgggacgcggatcgcattgacgctgtccaccaccgggcgcagaccagcgtccatcgcctggctcacctgctgcgagtaaccgtagatcaccgcgtagtcagagacaaaaggcccaaactgttttttctgatcggcggtcagcgtcggcagacgttcaccgctacgcatcgccgtattctgcaggaagtcgataaacgctttgcgctgatcgccctctttatcaaaacacccactcaggctaaccaccatcaataaggccgccatagccgcaaaccagcgagagcaggactttcctgtcgccatttttttactcctttcagccaaaaaaagcgcacaacggcacacacgtgccagacgctgacaaggatagtccagctcggcctcgcaggataccctttcctgctaatcttacgcgggaaaaacaccattttgcacgccatcgtcgcgctgtagaacgtctgttatgcgcatcacaaatatggtcttaagatcaggtgggccagaacctcataaaccattgatattaatataaataaaaagccacaacccggcactgcgccttaaagcggacgataatcgcacgctttggcacgcgtctggattgcctgcctcgcacttcaatgatttgatgaatgagcgattaacggcgacatgttcgattatcgcacaaatcaaactcaacgacgcgaaggcgacgataataataaacctctgtccctcgctcagtctgccaggaaagccgtatgactaagacaaccatcgacattcaggcctttatcaacgagcaccccttcacccgctaccagtggatgatccttgcgctctgctttatcaccgtcgcgatggacgggttcgataccgcaattatcgggttcatcgcctccgacctggtgcaagagtggggcgtggaaaaatcggccctcggcccggtgatgagcgccgcgctggtgggcctggcggtcggcgccttaaccgcagggccgctggctgaccgcatcggccgcaaaaaagtgctgatcatgtcgatcgtggtgttcggcggattcagcctgctcaccgccttcgccaccagccttaatcagctgacgctgctgcgcttcctgaccggtctgggccttggcgcggcgatgccgaatgccgcaacgctaatgagtgaatatgcgccggagcgccgtcgggcgctgctggtgaacctgatgtttgtcggctttccgatgggatcttcgctgggcggctttttatccgcctggatgatcccgcactatggctggcagagcgtgctggtgctgggcggcgtgatgcccctcctgctggcggtggcattaatattcctgctgccagagtccgtccgctatctggtagtgaagcagcacccggcgcagcgcattgctgctatcctgcgccatatcgcgccgctgccgaagacagtggaatttgtactacgcgaagcaggccaggtgaaagagaaatccgcgatcggcgtcattttctctcctcgctacgcggtgggtaccgtgatgctgtgcctgacctactttatgggcctgctgattttctatctgctgaccagctggctgccgctgctcatccgtgaaaccggcgcctcgatgagtcaggcctcaattatcaccgccctgttcccgctcggcggcgggattggcgtgctgatcctcggcgccctgatggacaagatcaaccccaataaagtggtggccgtcggctggctgctgaccggcgtttttgtctgcctggtgggtttctccaccagcagcctggcgctaatgggagtgatggtctttatcgccggcagcattatgaacggcgcgcagtcgtcgatgccggcgctggcggctggcttctatccgacgcaggggcgcgccaccggcgtcgcctggatgctgggtatcggccgcttcggcggcatcctcggcgcgttcagcggcgccttcctgatgcaggctcagctctcctttgagaccattttcaccctgctggccatcccggcgttcctgtcagcctttgcgctgctgatcaagtaccgggtcagtaaatccgtgccggcgacgacagatgaggcgagaagcctgcagaaagcctaaccctataagccggcgccccgcgccggctttgccgcttttttcttatccgtttacaaaaattttcgaagccacctcatcgcgttaataatcattcttttaggctacgctgccgtttggctgtcggggcagattcgatagcctgttggcaaataatcaccgacgttaccatcccttgcgccattttctgactattcttaatgagctatagaaaaatcttttccgctgtgtgataaaaggagttctcaatggaatataaagatcccgtgtttgaactgctgagcagcctggaacacatcgtttttaaggatgataatcagaaacttacctcaaaccgtaagtccactgtatttagtgaatttgaacagctgcgtaaaggcactggacttaagattgacgactttgccaacgtcatgggcgtgagcgtcgccatggtaagagagtgggagtcgagacgggtcagaccgtctcccaccgagctgaaattgatgcgcctgattcaggccaatccacagctttcacgacaattactcgattaatctcgcgcgcagcggcaaaggccagtaagggagcttttgccgctgcaccgtaaaaaaaagtttgctatcaggtgctgaacgtgcgttaatgctcgcaggtttgatgtacagaccacagagcagtcgaatagagcagtccttcaaaggttatccaaagatacccccgtagtgaactttccctttatcgctttaaatctgtagtccagacccctacgccgcaaggctcacttatttttttaaaggtaattcactatgtccggtaaaatgactggtatcgtaaaatggttcaacgctgacaaaggcttcggcttcatcactcctgacgatggctctaaagacgtgttcgtacacttctctgctatccagaacgatggctacaaatccctggacgaaggtcagaaagtatccttcaccatcgaaagcggcgctaaaggcccggcagctggcaacgtaacttctctgtaagttcaagccgctaagaatcgagaatccctgcctgatggcggggattttttttatctgtcgccagtagccgccagcataagatggcggctaccgggcattcaaagcagggaaaagtgccagctcgtctcccgccacgccagactatgggtcagcttcagaccttgtaaaaacgcctcatcatgcgacaccaccagcatcgcgccgggaaacgccgccagcgcgctttcaatagcctgcgtcgatgctaaatcgagatggttggttggctcatccaacaaaagcagctgggcaggctcgcgtcgccagagcacgcacgccagcgccgctttcaggcgctcgccgccgctgagcgccgacagcggcagagtgaccttatccgcgcccagctggagctgcgccaggcgggtgcgcaggaggccctcatccagtggggtatcttccaggctcaggtgcgccattaccgacagggataaatccagctgcgtcagatgttgatcgaggtaagcggcgctcaccgaaagccgaacatcgcctgacgcggcctgctccagccccaacagcgttttcagcaaagtggttttgccacagccgtttggcccctttagcgcgatgcgcatcggaccatcgatacgccagttcagcggcgcagccggcgcatggtcgagctgcaatgactccaccaccagaacctgcttgccggcggccacttcgctacccggcagggtaaacatcactggggtctcttcctcaacccgctcccgcgcctgctgcacggcggcattcagactgctgttctgttcacgatgctgacggcgcagcgctcccgggcgctcttttgccgcgcctttgtacttcacgcgctcgaaggaggcgatatttagcgtatcaacggtacgcagcgtctgagccgagcgccgctgggcggcgtcatgctccttttgcattcgcgcgcgggtgcgccgtcggtcggtcacggcatgctccagcgccgcgcgcgcagcctgctgctccgccatacgctggcgctgatattcatcatagttgccgccgtagctgcgcagcgccgtcggcgtcagctcaataatcctcggcatccgcgtcagcagctcgcggtcgtggctggcgatcagagccccgccctgccagctttccagttggtgatagagccactcccgcccctggcggtccagatggttggtaggctcatccagcagcagataatcggcgcccgagacgaaggcgccgcacagcagagccttcatccgctcgccgccgctgagtgaaaacgcggggcgatcggcagagaacggcgggagatcggcttcacggaacgctaaactcaggcgatcggtgagatcccagtgaccatctaacagatcgaaatcgtcggccagcccttggccctgttcaaggcgagacaaggcggcaaaaaccgacgcatagcccagcagcgtagcgagggtggtctccggcgtgagcgtcggctgctgcgctacccaggcaacggcggcggcgcgctcaatatggccgccggcaggagaatcaaggcccgccagcagacgcagcagacgagtcttgccgacgccgttccggccgaccaggccgcaaagggacggttccagcgagacgctgagcggaccaaacagggtctgtcccgtcgcaaactgacaggtgacctgatgtaaaacaaaagcggggatgtgggcgcaatgagccataagcactcctgaatgaaatcaatactcccctacccgcaacgtctgcgaggtaaggcgtgaaattcatcagtcgtgtttgttcatttgtggggcgcgctccggtgagacgagggattcgtcgggacataggatagccacactccggtatgcgttgcaagcctgttttattcaacgatcttgtaaaaataaaaaggcctcctgatatcaggaggcaaatgatttatttggtgaacaatgaaagggtgcattgagaatgcctgacaccgcaagcatggtggggatagatccccaccagatgctcttactgtttaatatcacaggctaagaatgccaccagctcaatatttccctgcctgcgctgtaattcacatagcgaatcacgaaccatccaggtcaataataaaatagtgaagcaaatcactactaagccaaacaacagatacttttgcggcattccacgcctccagtgtgtgtaagttcacacagatattgcaattgcctcagaacactaaaggagggattgccagatgttgatgcagcatatcggtgtcggctattttgggtattaccgagcaactgcttatgcgatgaaacactctcttatgcccgagattgcgaagttaagaatgaaggctctgaacttctgggataagcacgggatccgtgccgcagctgatgcttttgacgtatcaacgcgaacactctactggtggcgccggttactgcgcaccggtggtccagaagcactaattccaagaagcaaagcccctctggttcgccgttcaaggcactggcatcctgatgtactcaaggagatcaggcgtctgagaactgagttacccaatctcggcaaagagcagatttttgtcaggctgaaaccatggtgtgaagcgcggcattttacctgtcccagcacgtcaaccattggaagaatcattgctggtgctcacgataaaatgcggatgatccccgtacgcctcagcgccaggggcaaagcccggttgataaaaaaacgctcagtgaagcccagaagaccaaaacaataccgcccggtaaaaacaggcgaactcatagggatggacgcgattgaactcaggatgggggacctacgccgctatatcattaccatgatcgacgagcacagcgactatgcgctggccctggcggtcccttcactcaacagcgatattaccagccatttcttcagcaaggccacaaagctctttcctgtcgctatcagacaagttgtcactgacaacggtaaggagttcctcggtaactttgataaaacgctacaggaagcctcgattaaacacatctggacctatccgtacacaccgaaaatgaatgcgacctgtgagcgatttaaccggacacttagagaacaatttattgaattcaatgaattgttgctttttgaggacctgaatttgtttaatcaaagaatggctgaatatctggtgctgtataacagcaaaaggccacataaatcactcgaactgatgacgccagtggactatattttacgtgagagtaaaaattgcaatatgtggtggacccatacacagtgttgattttcaacaagtaagaggctactcttatggtgttcatgcataggggagcctcactttgattactatcaggtggggcttttctctgtctgtctcccgctgaatacctgagacacatagtctcaagcacccgccgccattctagcgtaaatacctctcggaattatgtttatatattcctaaaacttttcttctcgatgaatgcaaataatgaagatatcaatggcagaattattaacggttcacctatttatatttcacgtataaaaaaacctgccctgaggcaggtctttattattaccgatacgcttactgcagcagagaaatatccgccacctgcaggaacagttcacgcagtttggacagcagcgtcagacggttgatgcgaacatctttgtcttcagcgttaaccatcacgttctcgaagaactcatccaccggctcgcgcagcgcggccagctcgatcagcgcatcctgataacggcctgcggcgaaatacggctgcagcttgtcgcgcagcaccaccagattacccgccagcttaatttccgccgcttctttcagcaccgaagcgtgaacgatgtcgttcagcgtctcatcggatttcgcgaggatgttagagacacgtttgtttgccgccgccagcgcggaggactcttccagagtacggaagtgcgataccgccttcatacgcgcatcgaaatccgccgggcgggttggacgacgcgccagtaccgcctggatcgtgtcgacgccgtagccttcgtcctgataccaggcacggaagcggcccagcataaagtcgatcacatcatcaaccacgttggcgttggtcagcttctcaccgtacagacgaaccgcttcttcggtcagcgtctgcagatcgagatccaggttcttctcaacgatgatacgcagcacgcccagcgcggcgcgacgcagcgcaaacgggtctttatcgcctttcggatgctgaccgataccaaagatacccgccagggtgtccatcttatcggcaatcgctaccgcgcaggccaccggattagacggcagcgcgtcgccagcaaatcgcggctgatactgctcgttcagcgccacggccacgtcttccgcttcgccgtcatggcgcgcgtagtgcatccccatcacgccctgggtgtcggtgaactcgaagaccatgttggtcatcaggtcgcacttggacagcaggcccgcgcgggttgcgtggttcacgtcagcgccaatctgttcggcaatccagcccgccagcgcctggatgcgatcggtcttgtcgcgcagggtgcccagctgctgctggaacagcacggtttccagacgcggcaggttatcttccagacgttttttacggtcggtattgaagaagaactcggcatcggccagacgcggacggaccaccttctcgttaccggagatgatctgctgcggatctttggactcgatgttggccacgaagataaagttcggcagcagtttgccggcgttgtcgtagaccgggaagtacttctggtcgcccttcatggtgtaaaccagcgcttcagacggcaccgcgaggaatttttcttcgaacttcgccgtcagcaccaccggccattccaccagcgaggtgacctcttccagcaggctttcgctcagatcggcttgaccgccgatcttacgcgccgcctcttgcgcatcagctttgattttggctttacgctgttcgtaatcggcgatgactttaccgcgctccagcaggatctgcgggtactggtcggcatggtcgatggtgaactccggctcgcccataaagcgatggccgcgaatcacgcgatcggacggaataccgaggatagtggccgggatcactttgtcacccagcagcaaagtcaccgtgtgtaccggacgcacgaagtggacgtcagacgcgccccagcgcatcagtttcgggatcggtagcttcgccagcgagctggcaatcatgttcggcagcagcgcttcggtgctttcgcccttcacatgggcgcgatacagcaaccactcgcctttgtccgtggtcagacgttcggcctgatcgacggtgataccgcagccgcgcgcccagccttcggccgctttgcttggcttgccttcggcatcgaacgcctgggcaatagccgggccgcgtttttccacttcgcgatcggcttgcgccgccgccaggttggccaccttcagcgccagacgacgcggggcggcaaaccattccactttaccgtgcgcaaggccagcgttatccagctccgcggtcacattcgcagcaaaagattccgccaggctgcgcagcgcttttggtggcagctcttcagtgccgatttccaccagaaaagtattctcagacatggccgcctcttatttattcttgttgcacatcgggaagccgagcgcttcacgggaagcgtagtacgcttccgccactgctttagtcagggtgcgaatgcgcaggatatagcgctgacgctcggtgacggagatggctttacgcgcatccagcaggttgaagctgtgagccgctttcagaatacgctcgtaggccggcagcggcagcggggtctccagcgccagcagctgctgggcctctttctcatactgttcgaagcaggtgaacaggaagtcgacgtcggcatattcgaagttataggtggactgctccacttcgttctggtggaacacgtcgccgtaggtggttttccccaacgggccatcgctccagaccaggtcatagacgctgtccacaccctggatgtacatcgccagacgctccagaccgtaggtgatctcgccggtcaccggcttacactcgaggccgccgacctgctggaagtaggtgaactgcgtcacttccatgccgttgagccacacttcccagcccagaccccaggcgcccagcgtcgggttttcccagttgtcttcgacaaagcgaatgtcgtggatagtcgggtccatacccagctctttcagcgacccgaggtacagctcctggatgttgtccggagagggtttaatcaccacctggaactgatagtagtgctgtaaacggttcgggttttcgccatagcggccatcggttggacgacgggaaggctgcacgtaggcggtcgccatcggctccggtcctaacgcgcgcaggcaggtcatcgggtgagaggtgccggcgccgacttccatgtccagtggttgaacaatggtgcagccctgacgagcccagtaatcctgtaaggtcaggatcaggccctggaaggtcctggtatcaaacttttgcatatgatttcgtgctggatacgtgtggatttaaaggaaggagtcagtatacccgctggctgcgagatatacagtacgaaacggcgttgtttcaggaaaacggacgaaatttacgccaggcggggtcgattcagcgcatcgaaagatgcataaactggccgtccgggtcaaaggaacagatgaaacgctcattcttgccggtacggccagaaagctcatagctcgcctggaattgttcaaagtggttcacgtcaacgagctgcgtttgcgtgttatagcggatagccgcctgatccttgcaaagctgcgccatattgagcgtggtttgcggcgtaatacgagcgcgctgcgctttttgcgtcggcggggagacggtctcgctgcagcccgcgaggagcagcaccagcatgacggaaacaacacctttcaccacgttctcctccaccgccttgttagcaagttgttatcttaaagattcagtattacaggtattttgcgaatatcatgaaactgcgacaagtctgtgaccgaaaactcagactaatctattgcgacaccgggaaaccgggcaggtcatatcttatttcgccagcagacattgagggactgatgcaagaaaagatacactggatcaccaacctgcgcggcatcgcctgcatgatggtggtgatgatccacagcaccagctggtatatcactcacccccatgcgattaccctgctgcaatgggatatcgccaatctgctcaattccgcctcccgcgtcagcgtgccgctgttttttatgatctcgggctacctcttttttggggaacgcagcgcccagccgcgccatttctggcggattggcctgtgcattgcgttctatagcgcgctatctctgctgtatatcacgctgtttacccatatcaacgtcgagctgtcgttaaagaatttgctgcagaagcctgtcttctaccacctgtggtttttctttgctatcgccgtcatctacctgctctcgccgctgattcaggttaagtccaccagtagcacaatgctgctggcgctgatggcgatcctcggcattctggccaaccccaatatggtcagcgttaaagccgtcgggattgagtggctgccagtcaacctctatatcaacggcgacaccttctactacgtgctctacggcgtgctgggcagagccattggcaccctggacaccgataaaaaatggctaacaccgctctgcgccgcgctgttcatcgccgccgtgtgggtcatttcccgcggcacgctgcatgagctgcgctggcgcggagacttcggcgacacctggtatctctactgcggaccggcggtgtttgtttgcgcggtcaccctgctgacgctggccaaaaactggcttaacgcgcgtcccctgcccggtatcgcctgcattgcgcgacattcgctggggatctacggctttcatgccctgatagtgcatgcgctgcgcgccagccatctggagctatcccgctggccgctgctggatattgtgtggatatttagcgccgccctgctcggcagcctgctgctgtcaggcctggtgcagcggattgatagccgccggctggtcagctaacggtccgccgcccggaggggcccgacttacgtctcaggcccctcttccgtcacgctgagaggttcccgtaagcgcgtcgggtcccagacatcacgcacgtttttctgtaccgcaacagcgccaaacaggctcaaaaaatacgccagcccatagaaccctttctcgctgagcagcagagtggcattccacagtccgataaccagcagacctacagcgataacgaagaccaccagacaggtggtgtagtacagcgcggtggtcggaatggcttcatacttatcgcgcaccgtcttttgataagatgccgcggcaaacagccccagtaccaggacggcaaaataatagcctttctcattcaactgcatatcggcattccacagccccaccagataggtgacgatgccgccgatcagggcaatccaggagatcaaatgaaacgcaggagaatacgtcgcgtgcttgttttccatcattttttaccttttacgcgcctcggggcggcgcttattccgttttttgcatcgcgcgggcgatgcgggtccgttcgggggttgccgatgcgccatataagcagacaaaccatgccgcgatatagacggctttttcatgccagtctgccggtacataccaggcgccgaccagcagcaggccgaccgatagcagcagcaccagccggcataaggcaataaaaccgtcgtcctgttcctgccactgactggcgcgctgatgggcgagaacagcaaacatccccatcaccagcacgccgagaaaataccctttgccgctgaacagcgggcaggtccgccagataccgagcagataaaccagcgatcctgtcgccatcatccccctggcaatattgcgttttgtgatcatctcacctccctggtcgacaggggctgattatgaccgactccctcggcgatgcctcagattacgtacgacaaagcggagatttcggaataaataaatacgcatttatggatggatgtagccgggacattcaggaagggaatccgcccggcgctgccggacggactgaggctaagacatcagcggtttcagttgctgataaatctggcggaaggtttcccgctgcggcgcatagtgggccacacggcgatcgtccgggcgatgggcttgttcaagcggcagcggcttcagcagcccggggcggtctgcctcgtcgtgaaccgccagctgcgccagcctggccgcccccagcgccgggccgacatcgcccccggtacggtaatcgagctgcaggccgctgatatccgccagcatttgccgccagtaagcgctgcgcgccccgccgccgataagcgtgatgctctgcggcttgatgccgcaggcgtgcaccacgtccataccatccgccagcgcatagcccaccccctccagcaccgcccgcgccagctctgccggcccatgctgatgcgtcaggccaaaaaagacgcccttagcctgcgggttgttgtgcggcgtgcgttcgccagacagatagggcaggaaccacaccggaccggcgctttcatccgccgtctgcgccgccgcgatcagcgccggcacgctggcgagaccggttaattttgccgcccagtccagacaggaggccgcgctgagcatcaccgacatcaaatgccagcggcccggcagggcatggcagaagctgtgcaccgcgctttcgggtttgctaagaaacccttcactgacggcgaagtagacgcctgacgtacccagcgacagcatcgcctgaccggcatcggccatgccgaccccgaccgcgcccgcggcgttgtcgcccccgccgcccaccaccagcgccggcggcatattccacgcctgcgccacctcaggtcgcagttgcccggtgacgtcgctgccttcgaacagcgccggcatcgcatcccgactgagatcgcaggcggcgagcatctcgtcgctccagtcgcgccgggcgacgtccagccacatcgtgccggcggcgtcagacatatcgctggcgagctcgccggtcatgcgcaggcgcagataatccttgggcagcagcactttatcgacctggctgaacactgccgcctcgtggcgctgtacccataagagcttcggcgccgtaaagcccggcatcatcaggttgccggtgatctgccgggaagcgctgactttgtcttccagcagctggcactcttcggcgcagcggccgtcattccataaaatggccggacgcaacacctgtaacgatttatccagtagggtggcgccgtgcatctgcccggcaatgcccagcgccttcacgtcgcgcaggctatgctgcgcgcccagggctttcatcgccgtgtccgtcgccagccaccactgttcgggatcttgctccgaccacagcggatgcggacgcgagacggtgagtttttcggtatgcgatgccactacctcaccctgctcattgagcagaatggctttgacgcccgacgtccccagatcgatgccgatatacatactccctctccttaaacgcgcgccacggctgagcgtggcgcgaacagagcatcctggttgcggcgccggtcaccccgggcgccgccgtatgattacttgtcaaacagataatggttgaccaggttttccagttgttcctgctggccgctgcgatgctgcggcgccagctgatgctgagcggcatactgggcaatatcgctcagggtcatctgcccgttaaggatctgctgccccagctcaccgttccagccggcgtagcgtctggccacgcgcttatccagttcgccgtcctcaatcatccgcgccgcgaccttcagcgatagcgccatggtatccatcgcgccaatatgaccatagaacagatcgtatttgtcggtgctctgccggcgcactttcgcatcaaagttgagcccgccggtggtgaagccgcccgctttgaggatttcatacatcaccagcgcgttctcttcgacgctgttcgggaactggtcggtatcccagcccagctgcggatcgccgcggttggcgtcaacggagccgaacagccccagcgcaatggccgtcgcaatttcatgatggaacgaatggccggcgagcgtggcatggttagcttcaatattcagtttaatctctttttccagaccaaactgtttgaggaagccgtaaacggtagaggcatcatagtcatactgatgcttggtcggctcctgcggtttgggctcaatcagcagcgtgcctttaaagccgattttatgcttatgctccaccaccagctgcataaagcggccaatctgctcacgctcctggcgcaggtcggtattcagcagggtttcatagccctcgcgaccgccccacagcacatagttttcaccgcccagttgatgggtggcattcatggcggtgaccacctgggtggccgcccagctaaatacttccggatccgggttggtggccgcgccggcgccgtagcgcgggttggtaaagcagtttgcggtcccccacagaagcttcacgccgctctgctgctgtttctcagccagcacctcgaccatccgggcgaagttattgctgtactccttgagcgaagcgccttccggcgagacgtcaacgtcgtggaagcagtagtaaggcacgttgagtttatggaagaattcgaacgccacatcggctttgcgtttggccatctccagggcgtcgccaggctgctgccagggacgatcaaaggagcccacgccaaacatatcggcgccattccagcagaaggtgtgccagtaacaggccgcaaaacgcagatgatcttccatccgtttgcccagcaccagttcatccgggttgtaatgacggaaagccagcgggttagtggatttcgggccttcgtaacgaacgcgatcgagttgatcgaaataggtctgcatagagaactccatattcagagatgcggcgaataaccaatcagataccctaaataattcgagttgcaggaaggcggcaggagcgcgagtccccggtaaccgggggcggagcaacgaatgtcaccaacccacctacaacttgaagtatgacgggtttaagccaatatagaatttcgctttcattttcctcaattacgttatttcacaccgccattgagagaatccacaaacgtgcgccagctcgcaaaaataatatccagtcaccgttgcgccgctttgtcagagacagtccagtgcaataataagagcgtgcatgaataaaatacgatcgccgtcataatttgcacattaaacgaaatttcataacggcaaaataagaaccggtaattgccagccctgctttccgcgttaagaatctgtaacgtatccgcaacctcatgtatcaaacattattttccgttcggcttacctacccttacaaaaaaggtatcgttattatgaagataaagaacctttgccttacgctttgcgccagctccctcctgctcgccagcatggcggggatggcgaaagaagtgaagattggcatggccatcgacgatctgcgtctggagcgctggcagaaagaccgtgatattttcgtcaataaagcggaatccttaggcgccaaagtttttgtccagtccgctaatggcaatgaagaaacgcagatgtcgcaaattgaaaacatgatcaaccgcggcgtcgatgtgttagtcattattccttataacggccaggtactcagtaacgttattaaagaagccaagcaggaaggtattaaagtcctggcctatgaccgtatgattaataatgccgacattgatttctatatatctttcgataatgaaaaagttggtgaaatgcaggcgcaaagtctggtcgacaaagtgccgcagggtaattatttcctgatgggcggttcgccggtggataataacgctaaactgttccgcgccggacagatgaaggttctcaagccgtatgtcgatgatggcaaaattaagattgtcggcgatcagtgggttgacggctggctgccggagaacgcgctgaaaataatggaaaacgcgctaacggcgaataataacaagatcgatgccgtggtcgcctccaatgacgccaccgccggcggcgccatccaggccttaaccgcccaggggctggccggcaaagtggcgatctccggtcaggatgccgacctggcgggcgtgaagcgcattatttccggtacccagacgatgaccgtctataaaccgattaccaccctggccaccaacgccgctgaaatcgccgttgagctgggtaacgataagcagccgaaggccgataccacgctgaataacggcttaaaagacgtcccttcgcgcctgttaacgccaattgaggtaaataaagagaatatcgacgccacggtgattaaagacggtttccataaaaagagtgaactgtaatggctgacgccccgctgcggggcgtcattttcatcccgccggatatcactgttgcggagtctttatgacctggctactcgaaatgaagaacatcaccaaaaccttcggcgctgttaaagccgtggataacgtcagcctgcgcctgaacgcaggcgaggtggtctcgttatgcggtgaaaatgggtcggggaaatcgacgctgatgaaggtgctgtgcggtatctatccgcacggaagctatgagggcgagattatttttgccggcgaaacgctgcaggcaaaccatattcgcgataccgaacgcaaaggcatcgccattattcatcaggagctggcgctggtgaaacatctcaccgtgctggagaatattttcctcggcgccgagatatcccgccatggtctgctggattatgaaaccatgacgctgcgctgtcagaagctgttggcgcaggtcaatctgcccatttcccccgatacccgcgtcggcgacctcggccttggtcagcagcagttggtggagatcgccaaggcgctgaataaacaggttcgcctgctgatcctcgacgaaccgaccgcctccttaaccgaacaagaaaccgcgacgctgctggcgatcgttcgcgatctgcaaaaccacgatatcgcctgcatctatatctcgcataagctcaatgaggtcaaagcgatctccgatacgatctgcgtgatccgcgacggccagcacatcggcacccgcgatgccagcggcatgagcgaagacgatatcatcaccatgatggtcggccgcgagctcaccgcgctctatcccagcgagccgcacgcccacggcgaggagatcctgcgggttgaacatttaaccgcctggcacccggtaaaccgccatattaaacgggtcaatgacgtctcattttccctgcgtcgcggagaaatcctcggcatcgccgggctggtcggcgccggacgtaccgaggcggtacagtgcctgttcggcgtctggccggggcgctggcaaggggagatctttattgatggccagccggtgagcatctctaactgccagcaggccattgcccacggcatcgccatggtgccggaagaccgcaaaaaagacggcatcgtgccggtgatggcggtgggcaaaaacattaccctcgcggcgctcaaccagttcaccggcgcaatgagtagcctggacgacgccgccgagcagcactgcattcagcagtccattcagcgtttgaaaattaaaacctcctcgccggagttggcgattggccgtctgagcggcggcaaccagcaaaaggcgattctggcgcgctgtctgctgctcaatccgcgcattctgatcctcgacgaacccacccgtggcatcgatatcggggcgaagtatgaaatttataaactgattaaccagctggtgcagcagggcatcgcggtcattgtcatttcatccgaactgcccgaggtgctcggtctcagcgatcgggtgctggtcatgcacgaaggcagactaaaagccaatttggttaatcaacatctgacccaggaacaggtgatggaagccgcgctgaggagcgaacgccatgtcgaagaacacgtcgtctgaaatcaaactcaccccaaccgcccccgcggccctgccggcgctaaaagggctgaatctccaggtcttcgtgatgatcgccgccatcgtcgtcattatgctgtttttcacctgggttaccgatggcgcctacctgagcgcacgcaatatctccaacctgctgcggcagacggccatcaccggcatcctcgccgtcggcatggtgtttgtgattatttcggcagaaatcgacttgtccgttggctcgatgatggggctgctgggcggcgctgcggcgatctttgacgtctggctcggctggccgctgccgctcaccattctggtgacgctggtgatgggcctgctgctcggcgcgtggaacggatggtgggtagcctatcgcaaggtgccctcgtttatcgtcacccttgccgggatgctggcgtttcgcggcattctgatcggcatcaccaacgggaccaccgtctcgcccaccagtccggcgatgtcgcagatcggccaaagctacctgccagacggcatcggcttcggcatcggcgttgtcggcatggcggtgtttatcgtctggcagtggcgcgggcggatgcgccggcaggcgttaggtctggcgacctcgtcctccaccgccgccgtcggccgccaggccattaccgcggtgattgtgctgggcgcaatctggctgctcaatgactatcgcggcgtaccgaccccggtgctgatcctcgccgccctgctgctggcgggcctgtttatggccacccgcaccgcctttggtcgccgcatctacgccatcggcggcaacctggaggcggcccgtctgtccgggattaacgtcgagcgtaccaagctggcggtgtttgccattaacggcctgatggtcgccattgccgggctaatcctcagctcacggctcggcgcggggtcgccttcggcgggcaatatcgccgaactggacgccatcgccgcctgcgtcatcggcggcaccagcctggcgggcggcatcggcagcgtcgccggggcggtaatgggggcgtttattatgtcggccctggataacggcatgagcatgatggacgtcgccaccttctggcaatatatcgttaaaggcgccattttgctgctggcggtgtggatggactctgccaccaagcggcgcgcataaggagagactctctgaagaatgtctgaattctttgcgctaccgccaaacttcgccataaggcgcttgaaatatctcgggcattagccggtagtgtatacccaacatcattcgggttgcagacggcgcccccggccgcgtaccggcgtacgtggccgggatgagtggtaagtcaggccatcggcaacatcttgaatgaaggggtatgaccggggttagagcaggaacattatctatgtttgaaaagcgtcaccgtattacgctgttatttaacgccaacaaagcttatgaccgccaggtagttgaaggtgtcggcgagtatctgcaggcctcccagttggagtgggatatctttattgaagaggactttcgggcacgcatcgaaaacatcaaagagtggttgggcgatggcgtcatcgccgactatgacgatcccgaaatcgaaaagctgctggccgatgtccacgtgcccatcgtcggcgtcggcggatcttatcatcagccagagcagtacccgccggtccactatatcgccaccgacaacgccgcgctggtggaaagcgcttttctccatttaaaggaaaaaggggtgcaccgcttcgcgttttacggactccccgcctccagcggtaaacgctgggcggtagagcgcgagtatgccttctgccagctggtcgcgaaggagaagtatcgcggcgtggtctaccaggggctggagacagcgccggagaactggcagcacgcgcaaaaccggctcgccgactggctgcaaaccctgccgccgcaaaccggcatcatcgccgtcaccgacgcccgtgcccgccacgtcctgcaggcctgcgagctgctgcatatcccggtgccagagaaactgtgcgttatcggcatcgataacgaggagctaacccgctatctctctcgcgtcgccctctcctctgtcgcccagggcacccgccagatgggttatcaggcggcaaaattactccaccggctgttgaataacgaggccctcccgctgcagcgccagctgatcccgccgatgcgcgtcgttgagcgacgctccaccgactaccggtcgttaaacgatccctccgtgatacaggcgatgcattacattcgcaacaatgcctgcaaaggcatcaaggtggaacaggtgctcgacgccgtgggcatctctcgctctaatctggaaaaacgcttcaaagaggaggtcggggagaccatccacacggtgatccacagcgaaaaactggaaaaggcgcgcagcctgctggtgtccactagtctgtcgatcaatgagatttcgcagatgtgcggctatccgtcgctgcaatatttctattcggtgtttaagaaggagtacgacgtgacgccgaaagagtaccgcgatcggcacagcgaggtgatgctgtagggtaaaaaatgcccggcgacaaggccgggcatccggattacagatgggcggcgatgagccgctgattgtcctgatacatcgcgaagagatagttgttgtagctcgaccctttggtcgaataccccttcagcttatgaatcatggtgctggcggttacttcctgatccgccttgcgcagctgcaggcgcgacttgcggaaagaagaataggccgggtgggtgttcaggtttgttacgtaagcctgcaccgactgctctaccgactcaaactgcgagtaacctttcatcgcgccgcggcagcgaccggcgccgcacttcatgccgaacaggttgttattctcgcgcgccagcctggaggtaccccagccactttccgccgccgccatggtcgccaccatgctgttcggaataatgtcgacacgctcaagcagcgcgttccagggcacatgacgcgtattgcctgaccacttcaccttataacgggaagcgatatccttcaggcgcaccttctcagtcggtgaccagcgagcatcgtactgcttggaaataagccagttacgatccgcagtaatcgcctgattctgcttggtaatataaggcatgaccgtccggagaaacgcttttttccttggtgttccggaagggtattttcgcaagtcaggaagtgaactgctctttacactattgcgagaatactcttgtttactgcttaccttagtactacttatcttctttaccgttggggctttatgactctttgtcgctgtgtgcgttgtcgccaacacactacctgaaaagatgcaggttagtaacataagtatggcggccccatatcgtcgtatgggattcgatatcatcaggtctcctggtcggatatatgcattccaacaccttgtttttcacaaaaaaacgatagctgaatcgctaatagtatcaaaaatacgcactgagggcatcaacagaaatagtccaattcctaattgctgtcatctgaaatcggtttctgcggcgcatcgccagcgcgaaaatgctagcttcgtctcatttttagcctattttttgagcggtgtcactcaccccttttcatcctcctggtaaaacgcgcgtcaggaggagttcacccgcgcggcgacaaggcacactagataaaaaccgctcacaggatctcgcaatgaaactcgctgcgcttgccacgttattcgtgcctgggatggcctttgccgcctggactaccaccgactttcctgcttttaccgaagaagggaccggccgattcatcagccagaaagtggttgagaagggtacacgtcccctgcagctaaattttgaccagcagtgctggcagccttccggcggcattaagctcaaccagatgctgtccatggagccctgtcgcggcacaccgccgcaatggcgcatcttccgccagggtctgtataccctggaggtggatacccgttccggcacgccaacgatgatgatttcgctggaggaaaaagagaccagcgccgcggcgccgcagatccgccagtgtccgaagtgggacggaaaacctctgaccatcgacgtcagcaaaaccttcgccgagggcagcaaggtccgcgatttctacagcggcaatgtcgcgaccgtcagcggcggcaaaatcaccctgcagcccgccttcggcagcaatggcctgctgctgcttgagcgcgccgagacggccgccccggcgccgtttgactggcacaatgccaccgtctacttcgtcctgaccgatcgcttcgtaaacggtaacccggccaacgacaacagctatggtcgccataaagacggcatgcaggagatcggcaccttccacggcggcgacctgcagggattaaccagcaagctggattatctgcagcagatgggagttaacgccctgtggatcagctccccgctcgagcagatccacggctgggtcggcggcggcacgaagggcgatttccctcactacgcttatcacggctattacacccaggactggtcgaaactggacgccaacatggggaccgaagcggatctccgccgactggtggatgaagcgcataagcgcggaatacgtattctgttcgacgtggtgatgaaccatgccggctacgctaccctggccgacatgcaggagttccagttcggctccctgtatctgcaaggagatgagctgaaaaaaactctcggcgagcgctggacggactggaagccgggcgcgggacagacctggcacagctttaacgactatatcaacttcagcgacaaagccgggtgggagaaatggtggggtaagaagtggatccgcaccgatatcggcgattacgacaatccgggctatgacgatctcaccatgtcgctggccttcctgccggacctgaaaaccgaatcgaaggaggtctcaggcctgccgaacttctatagccataaaccagacaccgcagcgaaagcgatcccgggctatacgccgcgcgactatctgacacactggctgagccagtgggtacgtgactacggcatcgatggcttccgcgtcgataccgccaaacatgtggagatggacgcctggcagcagttaaaaacccaggccaccgccgcgctggcggagtggaagaaagccaatccggataaagcgctggatgcggcgccgttctggatgactggcgaagcctggggacatggagtgatgcagagcgattattatcgccacggttttgatgcgatgatcaatttcgactaccaggaccaggcggcgaaagcggcgacctgtatggccaatattgacctcacctggcagcaaatggcggacaagctgcagagctttaacgtcctgagctacctctcctcgcacgatacgcggctgttccgcgaaggcggcaccaccgcggcggagctactgctgctggcccctggcgccgtgcagattttctatggcgacgaatcatcgcgcccgttcggccccaccggctcggacccgctgcagggtacccgctcggagatgaactggcaggatgtcaacggcaaggcggcccgcagcgttacccactggcagaagatcggccagttccgcgctcgccatccggcaatcggcatgggcaaacagacaacgctgtcgatgtcgcgtggttacgggttcgtgcgtgagagcggtgaagacaaagtgatggtcatctgggccggccagcagcagtaatccacatgtggctctccgccctgcggggagccaccatttagaacaaaatgctaacaaaatagcaatatacaggataaagataaaaacccgcctcctcccgccgatttgcaccacgccagcgctggcgttatggttagccactttccagaaccaccgatagactattcgcgatgacattttcccttttcggcgacaaattcacccgtcattcaggcatcacccgcttgatggaagaccttaatgacggtctgcgcacgccgggcgctattatgctgggcggcggcaaccccgctcagatcccggaaatgaatgactacttccagcagctgctggccgacatgctggataatggcaaagcccttgatgcgctttgtaattatgatggtccacagggcaaaagcgagctgctggctctgctggcgaatatgctgcgcgacgagctgggctgggagatcgaaccacagaatattgcgctaacaaacggcagtcagagcgcatttttctacttatttaatctgtttgcaggccgtcgggcagatggcaccacccgtaaggtactgttcccactgacgccggaatatatcggctacgccgatgccggtctggaagaggatctgttcgttgccacccggccgaacatcgaactgctgccggaaggccagtttaagtaccatgttgattttgagcatctgcaggtgacggaagagaccgggatgatctgcgtctcgcgccccaccaacccgaccggcaacgtcatcactgatgaagagctgatcaaactggatgcgctggcgaatcagcacggggtcccgctggtgattgataacgcctacggcgtgccgttcccgggcattatctttagcgacgcccgaccgctgtggaatccgaacatcgtgctgtgtatgagcctgtccaagctgggcctgccgggcagccgctgcgggattatcatcgccaacgaaaaaatcatcaccgccatcagcaacatgaacggcattatcagcctcgcccctggcggcatcgggccggcaatgatgtgcgaaatgattaaacgacaggatctgctgcgcctgtcagagacggtgatcaagcccttctattaccagcgggtgcaggaaaccatcgccattattcgccgctatctgccggaggagcgctgccttattcacaaaccggagggggcaatcttcctctggctgtggtttaaggatctgccgatctccaccgagctgctgtatcagcggctgaaaaagcgcggcgtgctgatggtgccgggggattacttcttccctggtctggataaaccgtggccgcacacccaccagtgtatgcgcatgaactatgtaccggacccgcaaaaaatcgaagccggagtgaaaatcctcgccgaagaggtagaatttgcctggcgcgaacaggaagcatagtctcggacgccgcgggcgggtaacgttcgtcagcgaccccattcatgccagcgccagccgctggcgtttttgcgcgcatagcgcttccagctctgcgggaaccatcacccgcagcgcctgcgtcgggcaggcggccacgcaggccggtccttcggcgcggtgatggcatagatcgcatttcaacgcctgcgcctgctggttcattaccgtaacggtcatcgcgccgtacgggcaggccaccatgcagcttttgcagccgatgcagcgccgctggtcgacccaccagacgtcattgtcgcgctgaatcgccccctgtgggcaaacgctggcgcagggcgcatcctcgcactgccgacaggccatcgccgtcgatatgtcaccgcttttcaccacccggatacgcggcgcgaaatggttcgtcgacagggcggcgacatcctgcgcctgctggtgcgccaccgcgcaggccacttcgcaggtacgacagccgatgcaccgctgggcattggcaataagaaactggttcatcctctgctccctggggataaaaccgcagggtgccagaatagtccctgcccgcgctttgatcctgaatggaatcagcgctgttttttgtcagatggcctgcaggatgtggtcatttgcctgacgcttcacgcaccgtgaaacccagctcacgcgaaattgcttcggcggtctcacgtagtggttttaacaagttcttttcgccagctccccggcacgaagtccgccggggagccgacgttaatgattaccggaacaatgccttatcgcgcaggatatgatcgttgccgcgacggcgggtgaagccaatccgatcgaaatactccaggatctggatcgccagcttccgccctacgtttaaggtatcgcggaaatccgccgcgcaggttgaaccgcgcagccgatccagctcgcgcacccgctgggcgaactgcacaatgcgatcgttgcggtagtaacgatccttgacgatcgcagtaatcatcccctgctgcgccgcctggcgcagcaccgcgcgcatcagtgactcttcaacatggacttcgcgcgcaagatcgcgcacccaccacggatcgtcgccgaacagagtctccaccttatgccagaccgcctgctgctcgtcggtaaacccggctttatgctccggcaaatgcagccagccgtgatggctgtggactaagccgctctcgcgcatctgctcaatcagcagcagcaccagcgcttcatcttccatcggcagcgcgatgcggcgcaggcgctcccggccagggcccggctcgtctcgatgctgctcatggtagcgcgcaagggcatccagcaattttcgctgccagcgggcggcaagcggcgcgctaagcaggcgctgtccggcctgcagatagtccggtcgctggatcagggccgccattccggcttcgctgagctgccgcgcccaggcgaagtgctcaagccggacggcatcccgctgcagatgtaactccagcgcctgcgcatcgtcagcgccgaccgctgccagggcgtgcagccactgcagatattccggtttacgtttgccgcgacgcggaggatccagcgtcaccacccgtgcgcccgccagcgtcaagcgagcagagatatcgcggagcaccagccggtcgttatccgccagccacagcggagtatccagcaccagctccgccaggttgccctcaagaagcgacacccggccggtaatgtggctggcagcatggtgaatatgcagcggctgccactggctgagcggcgtatggcactgcagctcgacaatcacccgttctgctggctccggcggtggtgaggagagcagccagtcgccgcggtgcacggcctctttttgcgcatcgccgacaatattcagcgcaatgcgctgtccggcgtgcgcctgctcaaccgcttgattctgggcatgcaggccgcggacgcgcatcggcgtgttgacgccggtaagccacagggtatccccgacccgtacttcgccggagagcgccgtcccggtgaccaccagccccgcgcctttgacggtaaaagcgcgatccagcgccaggcgaaaccgctgctgctgcgggcgggggcgctccgcaagctgcagcagatggctgcgcagttccgcaataccgatgttttccgccgccgcggtgggaaagaaagcgacggcgtcaaagcccagctcgcccagggtctgctcgacctcagcctgaacctccgccaccctggcggccgccacgcggtccgttttggtcagcgccacggtcagcgtcggctttccggtcaactgcaggatcgccaggtgttcgcgggtttgcgccatcaccccgtcatcgcaggccaccaccagcagcgcatggtcaataccccccacccccgccagcatgttggacaaaaacttttcgtgcccgggaacgtcaataaatcccagcacccgcccgtccggctgcggccagtaggcatagccgagatcgatcgtcattccccgcgctttctcttccggcaaacgatcggcattcacgccggttatcgcctgcagcagcgtcgttttgccgtggtcaacatgtccagcggtggcaataatcatcgtaacaacatctccataaagcgggtttcatcttccagacagcgcaggtccagccagagccgaccgtcataaatgcggccaatcaccggacacggcagcgcgcgccagcgggccgccagcgcctccagccggctaccgcggccgtcatgcggggtaaaggtcaacgccgcgctgggcaggcggtcgacgggtaacgagccgctgccaatctgcgactggcaggctgccacgctgacggcaaaatcagcatagtgtgccgccaggtcaggctgcaggcgttcagccagccggcggatctcctccgccggacgggtgagcaggcgcagcgtcggcaatttctccctcagcgcctccgggtgctgatagaggcgcagcgtagcctccagcgccgcgagggtcattttatcggcgcgcagggcccgcttcagcgggtggctttgcagctgggcaatcagcgcgcgtttgccgacgataatcccggcctgcgggccaccgagcagcttgtcgccggagaaactgaccaggctcaccccggcggcgatcatctcctgcggcatcggctcctttggcaggccatactgactgagatccaccagcgacccgctgcccaggtcggctaccaccggaacatccagttcgcgaccaatggccgccagctccgcttcgtcgacggctttggtaaagccctcaatgctgtagttgctggtgtggaccttcatcagcagcgcggtattgtcattcaccgcctggcgataatctttggcatgggtgcggttggtggtacccacttcgtgcagctgacaacccgcctgacgcatcacatcaggaatgcgaaatgcgccgccgatctccaccagttcgccgcgggaaaccaccacttcgcggccgctggcggtggccgccagcatcagcagaacggccgccgcgttgttgttcacgatacaggcatcttccgcgccggtgatctggcacagcagatcggcaatggcgcgatcgcgatggccgcgcccggcgtcgtcgagatcatattcgagcgtcaccggcgcgcgcatcgcgctggcaaccgcctccacggccgactccgcctggatggcgcgccccagattggtatgcaataccgtaccggtgagattaaacaccggacgcagggcgctccgctggccggcggtgagccgctgctcacaggcgtgcagccagtcatggctccagtcaggcagtgtctgacactggcggatctgttcccgcgcctcgtccagcatctggcgcagctgcgtcaccacctgcgaatggccgtgctgcgccagcagggaggaaaaagcggggtcgcggagtaagcggtcaatggccggaagccgggtataaagcgcacgaatttcggtagtcatgaatgggcctggcggtaagttattttcccccctcccgacgggagagggagtcaacaatcagcggcgattgtaacgcctccttgcgcaaactgttacctgcctgggtcaagtccgcggcggttcggtgcgcgcaaagctggcgcgctggaacagcgcatccaccaacttcaccaactgcggccgggtggcgcaccagcccggcgccacccggcgaaagttcaggtaggcaatggcgcaggccgtagagatggtcgccagattgacctcgtcaccgcgtagcgttccgtccgccgcgcaggcttccagcctgtcgaggccgcgcgccactttctcccgctggcggagcagctcttgctctgactgttgggccgcagggcgagctttttcgcgcaccagcgcctgggcggcctccatcaccccatctgccagcgcctcaagctggcgcatcctgagagcggctctggggtcggcggggatcatcggcggcgccacgcccagcagctccagatactgggcgatgaccggggagtcaaaccagcactcaccgtcgtccgtcaccagcgccggtaccttgcccagcgggttatagcgcgccacaccgttgctttcgctgtagggggattcgttgacaaactcaaaagggatgcgcttttccagcaggatcaccgatattttgcgcacaaagggactggtgtagctgccgatcagtttcatagcctgctccttatcgccaacaaattatcgccaacaaagatatgagtatggctcagggcgaggtaaaaggcaggtgagcatcccgctcaacctgccgccgatcgcattaatggtcgagatagaggtagtgcatccagctggtcatccgcagcagcactttacgcatcaccgaaacgtgggcgaaatggtcggagtagaccgccacctgcgcatagatgccatcgggtagtgcatcgatttcggcattcggatcgagctcaatggtcgccagcacgccatcgctgcccggcgtcacggtcagcgactgcaacgccccctgcgcctgataggttcccccggcaccaccggtaaaatgctcaccagtttgccgtggaatacctgtccgggcagggcgttaaacaccgcttccgcgtcgtcgcctttctccagccttaacagggaattttgccgaaactgggcgacgatcagccgtttttgctcggggataaacaccatcaccggacgcagcggcagcgaggcggcataggtccccggacggatcagcacctgggtgatatacccatcgcttggcgcccgcacggtggtctgatcgagattatatttcgcctccgccagctgggcgcgcaggctggccacttgcgactgctcgccgttgatcatgctgtccagctggctctggatctgcgcctgctccgccaccgacgccttgaccagcgcgtcctgggcaaggtaattctgcctggcgttatcgatgtcgctttccgagaacgggttcacccgcgcctggctccctttcaggtagcgctgatagtccttgtataagcgatcgcgttccgccgacacgcgggtggtgttggcctgggcttcagagagctgcgctttgagggtgttaatactgtgcagcgccgtcaccaggtcggcctgcagacggtcgacccgcgcctgatagcgcgccgggtcaatagtaaaaagcacctcaccctttttgacgcgctgattcgctttgtcggtgacgctgttaaccactccggtaacctgcggcgtaataggaatagatatcaccgccttttgcgccagaaaggtgtaagggtggttatagttcattaataaaataagcgcgctaacaataaatacgccccccagcgccgcggtaggtaccgtccatttatttaccggtattttgaagattttaaatatcgaccaggcgatggccacgtaggtcaaaattatcaacagatccatagattatttctccgccgcagaggtggactgcggccgctggatggccgccacctggtgttcaaggtcgctcagtcgttggcgaagctgttgtatatcggtctctttttcaggttcgtcaggggccgtattcgccttatgctgcatgccccagccgcgctcaggctggtacaacgtggcccaaatccataaaaacggccagatgacgtggagagtaaaaagactgacccatccggcgacatgaatagcatcggaatgagggtggttgcgttttttggcgatcaaataaggaatatcgtgaataatgataatcccataaaaaatgaccagaaaaacgaagatcagaacgcccagcgcaaaataattgagaaacataattccctcggctttacgctaaggaaggtgcgaataagcaggtcatttcttcccaagctgactcgctgattaaaatttcgcggatctgggccgatttttttcccgcaaacacatcgaatcagcctatttaggctattttttccaccatttctggcgttatttccggtttttactgagatctctcccactgacgtatcatttggtccacccgaaacaggttggccagggtgaataacatcgccagttggttatcgtttttcagcagccctttgtatctggctttcacgaagccgaactgccgcttgatgatgcgaaacgggtgctccaccctggcacggatgctggctttcatgtattcgatgttgatggccgttttgttcttgcgcggatgctgcttcaaggtttttaccttgccgggacgctcggcgatcagccagtccacatccacctcggccagctcctcgcgctgtggcgctccttggtagccggcatcggctgagacaaattgctcctctccatgaagcagattacccagctgattgaggtcatgctcgttggccgcggtggtgactaggctgtgggtcaggccactcttggcatcgacaccaatgtgggccttcatgccaaagtgccactgattgcctttcttggtctgatgcatctccggatcgcgttgctgctctttgttcttggtagagctgggtgcctcaatgatggtggcatccaccaaagtgccttgggtcatcatgacgcctgcttcggccagccagcgattgatggtcttgaacaattgacgggccagttgatgctgctcgagcaggtggcggaaattcatgatggtggtgcgatccggcagggcgctatccagggataatcgggcaaacaggcgcatggaggcgatttcgtacagggcatcttccatggcaccgtcgctcaggttgtaccaatgctgcatgcagtgaatacgcagcatggtctccagcggatagggccgtcggccattgcccgccttgggataaaacggctcgatgacttccaccatgttttgccatggcagaatctgctccatgcgggagaggaaaatctcttttcgggtctgacggcgcttagtgctgaattcactatcggcgaaggtgagttgatggctcatgatgtccctctgggatgcgctccggatgaatatgatgatctcatatcaggaacttgttcgcaccttccctaataatttatatgaattttattcacgacccactgacattcgggccgctattttgagcataattcacgcctttcatttttgccatccggcgtaaaaaagttattcggcagttaaggttgcttagttacagagccatctcgccctggccgcaaaaccgggccgagatcacagcggcgtaaaccccccgcgaaattctttgtgatcaaaatcacaaacaaacaacaaaaacacgaaacaaaaatgtgacaaatatcacacaaaaaggcagatcagcggctaaaaaggcgctgtgttgtttttttacacagtaattttgtgatcatcatcactaaaaaaccctcttagccacctatattcatgtgatccaaatcacataaaagggcgctggctggacagctaaacgattcagtgccagatttcgcactatcaatcagggcccggctacctctgccgccacattaacaacaaacctcgggctttaagcctgcgcgctacgcaaaacagaagaaggggtgttttatgtcatccgatatcaagatcaaagtgcaaagctttggtcgtttcctcagcaatatggtgatgccgaatatcggcgcgtttatcgcgtggggtatcatcaccgcgcttttcattccgacagggtggttgccaaacgaaacgctggcgaagctggtcggtccgatgatcacctacctgctgccgctgctgatcggttacaccggcggtaaattagtcggcggcgaacgtggtggcgtggtcggggcgatcaccaccatgggcgttatcgtcggcgcggatatgccgatgttcctcggctcaatgattgccggcccgctgggcggctactgcatcaagaagttcgataactgggtagacggtaagatcaaatccggttttgaaatgctggtgaataacttctccgccggcatcatcgggatgatcctcgccattctggccttcctcggcattggcccggcggtcgaagttctgtcgaaaattctggcggctggcgttaactttatggtggcgcacgacatgctaccgctggcgtctatcttcgtcgaaccggcaaaaatcctgttccttaacaacgccatcaaccacggtatcttctcgccgctgggtattcagcagtcccacgagctgggtaaatccatcttcttcctgattgaagctaacccgggtccagggatgggcgttctgctggcgtacatgttctttggccgcggcagcgcaaaacagtctgcaggcggggctgctatcatccacttcctgggtggtatccatgaaatctacttcccgtacgtactgatgaacccgcgcctgatcctggccgttatcctcggcgggatgaccggtgtcttcaccctgactatcctcaatggcggtctggtttccccggcttccccaggctctatcctggcggtactggcgatgacgccgaaaggcgcctacttcgctaacatcgccgcgattatcgcagcgatggcggtctccttcgtggtctctgcggttctgctcaagaccagcaaagttaaagaagaagacgatatcgaagccgcaacgcgtcgtatgcatgacatgaaagcggaatccaaaggcgccagcccgctggcggccggtaatgtcaccaacgacctgagccatgtgcgtaaaatcatcgtcgcctgcgacgccgggatgggttccagcgctatgggcgccggggtactgcgcaagaaagtgcaggatgccgggctgagcaacatctcggtcaccaacagcgcaatcaataacctgccgccggatgttgacctggtcatcacccaccgcgaccttaccgagcgcgccatgcgccaggtgccgcaggcgcagcatatttcgctgaccaacttcctcgacagcggtctgtacaccagcctgaccgagcgcctggtcgcggcccagcgccacatcgacaacgaagtcaaagtcaccgatagcctgaaagacagctttgacgatactaacaacaacctgttccagctgggcgcggataacatcttcctcggtcgcaaagcagccaccaaagaagaagcgattcgcttcgccggtgagcagctggtgaaaggcggttacgttgagccggaatatgtgcaggcgatgctggaccgcgaaaaactgacctcgacctatctcggcgagtccattgcggtaccgcacggcaccatcgaagcgaaggaccgcgtgctgaaaaccggcgtcgtcttctgccagtacccggaaggcgtgcgcttcggtgaagaagaagatgaagtcgcgcgtctggtcatcggcatcgccgctcgtaataacgagcacattcaggttatcaccagtctgactaacgccctggatgacgaaaccgtgattgagcgcctggcgaaaaccaccagcgtcgacgaagttctggcactgttaaataaataatcagcgctatccacccctctcctttgggagagggttggggtgaggggaaaggcctcaccccagccctctcaggtgaaaacattaattgaaggttaatactatgaaagcattacattttggcgcaggtaatatcggacgtggctttatcggtaaattgctggccgacgcgggcatcgaactgacgtttgccgatgtcaatcagaccgtacttgatgccctgaatgcccgtcatagctatcaggttcacgtcgtcggtgagaatgagcaggtggacaccgtctccggcgtcaatgccgtcagcagcatcggcgatgaggttgtggacctgatcgctgaagtggatctggtcaccaccgccgtcggtcccgtcgtgctcgagcgcatcgcgccagcgatcgccaaagggctggcgcagcgcaaagcgcagggcaccgaacgccccctgaacatcatcgcctgcgaaaatatggtgcgcggcaccacgcagttaaaaggccacgtgtttaacgcgctggcggaagaagataaagcgtgggtggaagcgcatatcggctttgtcgactctgccgttgaccgtattgtgccgccatcggcttccgccactcatgacccgctggaagtcaccgtggaaacctttagcgaatggattgtcgataagactcagttcaagggcgcgctgccgactatcccgggaatggaattaactgataacctgatggcatttgtcgaacgcaagctcttcaccttgaacaccgggcatgctataaccgcctacctcggaaaactggcgggccatcagacgattcgcgacgcgatcctcgaccagaaaattcgtgccgtcgtgcagggcgcgatggaagagagcggcgcggtgctgatcaaacgttacgcctttgacccgcagaagcacgcggcttatatccagaaaatacttggccgtttcgagaacccgtacctgaaagacgatgttgagcgcgttggccgtcagccgctgcgcaaactgagcgctggcgaccgtttaattaagccgctgctgggtacactggaatacgggctgccgcaccgcaacctggtgaaagggattgcggcggcgatgcatttccgtagcgaagacgatccgcaggcgcaggagctggcggcactgatcgccgacaaggggccgcaggccgcgctggcgcagatttccggcctggatgccgcaagtgatgtcgtcgcggaggccgttaacgactacaacgcggaaaaatgatgcacaacctggcgcggccgacgtcgcgcccattacgactcctgtcagatatgcaggcaatgatggaagaaacacaagcatttgaaaaccgtgtgcttgagcgtctgaatgctggcaaaaccgtacgaagcttcctgatcgccaccgtcgagctgttaacggaagcggtcaatattctggtgcttcaggtgttccgtaaagacgactacgcggtgaaatacgccgtcgagcccttgctggagggcagcgggccgctcggcgatctctctgtacgcctgaagctgatttatggccttggggtgataagtcgtgccgaatatgaagacgctgagctgctgatggccctgcgcgaagagcttaaccacgacggcaatgagtacagctttaccgacgacgaaattatcggtccgttcggcgagctgcactgcgtcgccgccctgccgccaacgccgcaatttgatgacagcgatgccgaactgctggcaatgcagaaactgcgttaccagcagatggtgcgctcaacgatggtgctgtccctgactgagctgatttcacgaatcagcttaaaaaaagcctttcagaaatcaacgctctgattccggttccgtctggtcgcaggtcggccggtaaagctgacgataatattccagacgctgcaggaacaacgcttccttatcctgaggaatgtctcgcggtacatgctgcagacgcggagactttttcaaatactccataaacgcctgactggaagccataaaatcaaccgctttgtcgattaaacgtggtacgccgtcgccgatctttgccatcacgtcctccttttgggaataatctgattaagcattagccaattcaccagcgtgggttaaggaaaacgtgcttatctgccgacaggcttcacagaaatgaaattagaacgggtattaggcggaatattaataaaattcaaattattagcgataaatgatattgcattccgcgggcgacaaacggcgaatttttgataaatagctatcaacaatagcggtcacggcacatactataggcgaatgaagcccctttattaacagatcaaatcaccatgaaagaagtcgaaaagaatgaaatcaagcgtctgagcgatcgtctcgacgccatccgccaccagcaggccgagctgtcgctggtggaagccgccgataaatatgctgaactggaaaaagaaaaagccactctggaaacggagattgaacgtctgcgttccgtccagagccagaagctgagcaaagaggcgcagaaactgatgagcctgccgttccgccgcgcgattaccaaaaaagagcaggccgatatgggcaagctgaagaaaagcgttcgcggcttggtggttgtccatccgatgaccgccctgggccgggaaatgggtctgaaagagatgaccggtttcgcccgcagcgaattttgatccccagtcctctccgtacggagagggctattctgtcttcactcccccacatttttaccttcagccgggtcgattggtccaaccaataatttcatccaccccctggcagttcacaaatccgtcaaaacccatcacaaacacgttgcttaagagtaacatctgattaaccattcattgtcatcaaccctgatacccttaattggccgggccaattttacttttggtgggatcggcaatgagcgcagactcagccctcctctcctggcggcccgatggagaccctgcatgaatctctggcaacaaaactacgatcccgccggtaatatctggctatccagtcttatcgcatcgctaccgattctgtttttcttttttgcgctgattaagctcaaactgaaaggctacatcgctgccacctggaccgtcgcaatcgcgctggtcgttgccttactgttctataaaatgccggtggaccgcgccttagcctcggtggtctacggcttcttctacggcctgtggcctatcgcgtggattattatcgccgcggtcttcgtctataaaatctcggtgaagaccggacagttcgacatcatccgctcatcgattctgtcgattacgccggaccagcgcctgcagatgctgatcgtcggcttctcgttcggcgcctttctcgaaggggcggcgggtttcggcgcaccggtggcgattaccgccgcgctgctggttggtctcgggtttaacccgctgtatgcggctggcctgtgcctgatcgtcaacaccgcgccggtggccttcggcgcgatgggcatcccgattctggtcgccggccaggtgaccggtatcgatagcttcgccatcggccagatggtgggccgccagctgccgttcctgaccattatcgtgctgttctggatcatggcgattatggacggctggcgcggcattaaagagacctggccggcggtgatagtcgcaggcggttcgttcgctattgcccagtacctcagctctaacttccttggcccggagctgccggatatcatctcgtcgctggtctccctggtctgtctgaccctgttcctcaaacgctggcagccggtacgcatcttccgcttcggcgatctcggcgcctcgcaggtggatatgacgctggcccgcacacgctacacggcgggacaagtgatccgcgcctggtcgccgttcctgttcctgaccgccaccgtgaccctgtggagcgtgccgccattcaaagcgctgttcgctcctggcggcgcgatgtatgacttcgttatcaatatttcggtaccattcctcgacaaaatggttgcccgtatgccgccggtggttagcgccgcgacgccctacgccgcggtgtataaattcgactggctgtcggcaaccggcaccgccattctgttcgccgccctgctgtccatcgtctggctgcgcatgaagccgaaagatgcgctgaccaccttcgccgggacgctgaaggatctggcgctgccgatctactctatcggcatggtgctggcgttcgcctttatctctaactattccgggctgtcgtcgaccctggccctggcgctggcccataccggccacgcgtttaccttcttctcgccgttccttggctggctgggggtattcctgaccggttcggacacctcgtctaacgccctgttcgccgcgctgcaggcaacggcggcgcagcagattggcgtctccgatattctgctggtcgcggccaataccaccggcggcgttaccggcaagatgatttccccgcagtcgatcgccatcgcctgcgccgcggtaggcctggtgggcaaagagtcggatctgttccgctttaccgtcaaacatagcctgatcttcacctgcatggtggggctgatcaccacgctgcaggcctacgttttaacctggatgatcccgtgatagtgatgcctaaacgcctggccgacgacgtggcgcgtcgcgtccgggcgctgattgaagaacaacagctggaggcgggcatgcgactgcccgccgagcgccagctcgccgcccagctcggcgtctcacgcaattccctgcgcgaagcgctggcgatgctggtcaatgaaggggtgctgttgagccgtcgcggcggcggcaccttcgtccgctttcagcatgagccgtggtcagagcaaaacatcgtccagccgctgaagacgctgctggccgatgacccggactacagcttcgatatcctcgaagctcgccacgccatcgaagccagcaccgcgtggcacgcggcgatgcgcgccaccgacgccgataaagaaaaaattcgtctgtgctttgaagcgacccagagtgaagacccggatatcgcctcgcaggcggatgtccgctttcacctggcgatcgccgaagcctcgcataacgtggtgctcctgcaaaccatgcgcggctttttcgacctgctgcactcctccgttaagcagagccgccagcgcatgtatcaggtgccgccggtgtttgcccgcctgaccgaacagcaccaggccgtcatggaggcgattgtcgccggcgacgccgaggcggcgcgccaggcgatgatgggccacttaggctttgtccacgccaccatcaaacgttttgatgaagaccaggcccgccaggcgcgaattacccgcctgcccggtgaccacaatgaaaattccagggagaactcgtgatgattatttccgccgccagcgactatcgcgccgccgcacagcgtatcctgccgccgtttctgttccactatattgacggcggcgcctacgccgaacataccctgcgccgcaacgtcgaggacctttccgatgtagccttgcgccagcgtattttgcgcaatatgtcggacctgagtctggaaacgacgttattcaacgagaagctggcgatgccgacggcgttggcgccggtcgggctgtgcgggatgtacgcccgccgcggcgaagtgcaggccgccggcgcggcggacgacaaaggcattccgttcaccctctctaccgtttccgtctgcccgatcgaagaggtcgccccgaccatcaagcgcccgatgtggttccagctgtatgtcctgcgcgaccgcggctttatgcgcaatgcgctggagcgcgccaaagccgccggctgctcgacgctggtctttaccgtcgatatgccgactcccggcgcccgctaccgcgacgcccattccggcatgagcggcccgaacgccgccctgcgccgctactggcaggccgtcacccatccgcagtgggcgtgggacgtcggccttaacggtcgcccgcacgatctgggcaatatctccgcctatctcggcaaaccgaccgggcttgaggattacattggctggctggcgaataacttcgatccgtcgatttcatggaaagacctggagtggatccgcgatttctgggacggtccgatggtgatcaaagggatcctcgatccggaggacgcccgcgacgcggtgcgcttcggcgctgacggcattgtcgtctccaaccacggcggccgccagctcgatggcgtgctctcctcggcccgcgccctgccggcaattgccgacgcggtgaaaggcgacatcactattctcgcagacagcggcatccgcaacgggctcgacgtggtgcggatgatcgccctgggcgccgacagcgtactgctgggccgcgcttacctgtacgccctggcgacccacggtaagcagggcgtggcgaatctgctgaacctcatcgagaaagagatgaaagtggcgatgaccctcaccggggcgaaaagtatccgtgaaatcagccgtgattcgctggtgcagaacgccgaagcgctgcagaccttcgatgcgctgaagcagaataacgccgcgtaattctccacgttttcccttacgccgcccctctccctcagggtgagggttcgccaaatatctgctattctgccccccgcaattaagggggcagtatgctgaacatcgtgttattcgaaccagagatcccgccgaacaccgggaatattatccgcctgtgcgccaacacgggcttcagtctgcatatcattgagccgatgggcttcacctgggacgataaacgcctgagacgcgccggactggactatcacgagttcactgccgtgcagcgccatgcggattacgcggcgtttgtcgccagcgcgcagccgcagcgtctgttcgccctgaccaccaaaggcacgcctgcgcacagcgcagtgagctatcaggacggcgatttcttgatgtttggcccggaaacccgcggtctgccggccagcatcctcgatgccctgccgccggagcagaaaatccgtattccgatgatgccggacagccgcagtatgaacctgtcaaacgcggtgtcggtggtggtgtatgaagcctggcgccagctggggtatcctggcgcggtcttgcgcagctaacctgagcggttcccggattacggcgcgttgcgccttatccgggctacatttctgtgcttagcagcggcaaatggcaatacatcaaatcccatcgccgtactcgaaggtgtggtggatgccattgaaatgctgatccatatccatcgccggcttgtcgctctccggcttgccgacgatacgcgccggtacgcccgccgcggtggtgtgcggcggaaccggctgcaataccaccgaaccggcgccaatcttcgcgccacgcccgacttcaatattgccgaggatcttcgccccggcgccaatcattacgccttcgcgaattttcggatgacggtcgccgctggttttaccggtcccgccgagggtgaccgactgcagaatagagacgtcatcttcaatcaccgccgtttcgccgaccacaatgccggtggcatggtcgagcatgatcccgcggccgattttcgccgccgggtggatatccacctggaaagagacggagacctgattttgcaggaaaatcgccagcgcgcgtcgcccctgagtccacagccagtggccgatacgataggcttgcaaggcatggaaacccttcagatagagcaacggcgtggagtatttatccaccgccgggtcgcgcgtgcgcaccgcctgaatatcgcaggcggcggaggcgatcatttccggatcggcggcgtaggcctcttccaccacttcgcgaatggcgatcgccggcataatcggggaagccagcttgttggccagcatatagctcagcgcgctgccgagattttcatgcttgagtagcgttgcgtggtaaaaactggcgagcatcggctcacagtcagccaaagcccgggcttcggctttaatattattccagacgatatccagttcttcacacggcattgcatactccaggcgatatagtaatgacctgccagttctgcgctggcagggtcattcaggtgacaaaggaaagctaattgctgctgcgctcgtccttgcgggcgcgacccaataaggtcaatgctgcctcgcgcgcaatttttccgcaatacaatacctgataaatttcctcggttattggcatttcgacacctaaacgctgtgccagaacgcgaacttccttggtattgcggtagccttcaaccacctggccaatcttgtcctgggcgctctgcacgtccataccctggccgagcatcatgccgaagcgacggttacgggactggttgtcggtgcaggtgagcaccaggtcaccgaggccggccatgcccataaaggtttccggatcggcgcccagcgccgcgccgaggcgggacatttccaccagcccacgggtaatcagcgccgtacgcgcattggcgccgaagccgatgccatccgacatacctgccccgatggcaatgacgtttttcaccgcgccgccgagctgcacgccgataaagtccgggttgatgtagacgcggaagcttttgccgcagtgcagtaggcgctgaaggtcttccgcaaactgcggatccgtggccgccagcgaaatcgccgtcggcaggccggcggccagctctttggcgaaggttggccccgagatcaccgccagcggaatatcatcgcccagcgcttcacgcgccacgtcctgcagcagacggccggtttcggcctccaggcctttggtggcccacaccagccgcgcgtcggaacgcatcagcggtttaatctggcgtaacacctgaccgaatacatggctcggcaccacgacaaggatgtcgcggctggcggccagcgcggtggccaggtcgctctcaagatgcagcgtatccgggaaaggcacatcgggaaggaacgcggcgttgcagcgatcgtgttgcagcgtcgcgatatgtttcgggtcatggccccacagcacaacgtggtggccatttcttgccagggtgatggcaagagcggtgccgtaagagccggcaccgatcacagtcattgcagcattaagtgcgttcatcaggcatcctgatgttgttcagcaccttcgccagcctgctgctgcagatagttcatgaacagcgcgtcgaagttcactggcgcaaggttaagttgcgggaaggtgccgcgggaaaccaggctggtgatgcactcgcgcgcgtacgggaacagaatgttcgggcagtatgcgccgaggcagtgcgccatctgggtgccttcgatgccgtcgatggagaaaataccgccctgctgtacttcacagaggaacgcggtttcttcgcccagcgcagcggtcacggtcacacgcagcaccacttcataaacgccttcagccagctgggtggaggcggtatccagatcaagtttaacttccggctgccagtctttctggaaaacttgcggcgcgttcggcgcttcaaaagagatatctttggtatagatacgctggatctggaaggtcatttcggtgctgttttgttctgacatagtaaaaccctttcgtgttgtccttaaatacgcgcttccgccagggaaagcgcgcaaaaattagcgcaagaggggatcaagtccaccacgtgaatcaagcgcatacaagtcgtcacagccgccaatgtgctgcgcatcaataaaaatctgcggaaccgtcgtccgtccgctgcgctggatcatctcctcacgcttcgcggcatcgccatcgatcggcaactcatggaacgttacgcctttgctgttcagcagcgctttcgcgcggatgcagaacgggcaggtcgctttggtgtagatctcaatattggccatgacttcactcctgttgttaccctgagggttttacgccgcagcctgtgttcccttcacgtcaggcgtgaaggagaaaacgcggcggcatcaccacgcgaggtaagttatttgccgcgtaccagagggaggttttcgccgctccagccagcaatgccctctttcagtacaaagactttttcaaacccggctttgttcagcgcgctggcgggctcttgcgcctgcatgccggaaccgtctaccacaataatgggttgcgatttgtgtttttccaactcgccgacgttattggctttgatatcgctgggcagcaggttaatagcgccggcaatatggcctttacggaaatcgtcacgctgacgcaggtcgaccaccaccgcatcttctttattgataagacgcgtcgcttcaccacgggtgatgactttaactttcgacatcagccccttgaaggtggtgaacactaccgcacccagcagcgcgatccacgcgatgctcaggaccgggtgacggccgatgaattgcataatttcttgcatggggggttacaactcccgactaagtgagaaaaaaaccaggaaaggagtatacctgtgccttgcggcaattacagccagtgagcgcgatgtaatgtattttctgcgggcggtggcgaaaaaaagccgctctcgctgacccggcgcggcccggccgctccctttctttgatctttcacggggatttaaacgattcagctgtagtaaaattacgcaaaatttctgtctttgagcatgaggttgtcgcaatgtcggtttctaaaaaacctatggtactggtgattctggatggctacggctatcgcgaagaccaacaggataacgccatttatagcgctaaaacgccggtaatggacgcgctgtgggccaaacgtccacataccctgatcgatgcatccggcctcgaagtcggcctgccggaccgtcagatggggaactccgaagtaggccacgtcaacctgggcgccggtcgtatcgtctatcaggacctgacccgtctcgatgtggaaattaaagaacgcaccttcttcgccaacccggtactgaccgccgcggtcgataaagcggttgccgccggcaaagcagtacatatcatgggcctgatgtcgccaggcggcgtccacagccacgaagatcacatcatggcgatggtggagctggcggcagagcgcggcgctgagaagatctacctgcacgccttcctcgacggccgtgatacgccgccgcgcagtgcggaaaaaacgctggcgacattcgaagccaaatttgccgcgctgggcaaaggtcgcatcgcgtcgctcatcggccgctattacgccatggaccgcgacaaccgctgggatcgcgtggaacaagcttatgatctgctgaccctggccaaaggcgaattccaggccgataccgccgtcgcgggtctgcaggccgcctacgcccgtgacgaaaacgacgaattcgtgaaagccaccgttatccgcgccgccggccaggccgatgccgcgatggaagacggcgacgcgctgatcttcatgaacttccgtgccgaccgcgcgcgtgaaatcacccgcgccttcgtcaacgccgacttcgacggctttgcgcgtaagaaagtggttaatctcgatttcgtgatgctcaccgaatacgccgccgacatcaaagtcgcctgcgcctacccgcccgcctcgctggccaataccttcggcgagtggatggcgaagcacgataaaacccagctgcgtatctccgaaactgaaaaatacgctcacgtcaccttcttcttcaacggcggcgtagaagagccgtttaaaggcgaagagcggatcctgattaactcgccgaaagtggcgacctacgatctgcagccggaaatgagctccgccgagctgaccgagaaactggtcgccgccatcaaaggcggaaaatacgataccatcatctgtaactacccgaacggcgatatggttggccataccggggtgatggaagctgccgtaaaagcggttgaagcgctggatcgctgcatcgaccaggtggctcaggcggtggaatccgttggcggccagctgctgatcaccgccgaccacggcaacgccgagcagatgcgcgacccggccaccggccaggcgcacaccgcccataccaatctgccggttccgctgatctacgtcggtaataaagcggtcaaagcggtcaacggcggcaaactttccgacatcgccccgaccatgctgtcgctgatgggaatggaaatcccgcaagagatgactggcaagccgctgttcatcgtggaataatccttccccatgaggggaaaggcgatgtattcaactacatggatcgcagcggcagttcgatccgtcctttacgccagcgcgctcagcgctggcgtattgctgtgcgcgtcatctgcgcatgccgacgatcgcgatcagctaaagtccatccaggccgacatcgccgccaggcagcgggcgattaagcaacagcagcagcagcgcgcaagcctgctcgcccagctcaaagcgcaggaagaggcgatcgccgccgcggcccgcaaactgcgcgaaacccaggatagcctgaaccagctcaataagcagattgacgagatgaacgccgctctcgcgaagctggagcgccagcgcgcgtctcaggagcggaacctcgccgcgcagctcgatgccgctttccgccaggggccgcataccggcatccagatggtgctcagcggtgaagagggccagcgcaatcagcggatgcaggtctatttcagctatttcaaccaggcccgccaggagactatcgcggagttgaagaaaacgcgcgaagagatggcggtgcaaaagtcgatgctcgaagaaaaacagagccagcagcaaacgctggtctacgagcaaaaggcccagcaggcgaagctggagcaggcgcgtaacgaacggaaaaagaccctttccggcctggagtcttccattcagcagggtcagcaacaattaagtgaattacgggctaacgaatcgcgcctacgcggtcgtatcgcccaggcggaggctgccgccaaagcccgcgccgatcgggaagcacgcgacgcgcaggcggtgcgcgaccgccagcaggaagcatcgcgcaaaggcactacctataaaccaacggaaagcgagcgttcgctgatgtcacgcaccggcgggctgggctcgccgcgcggtcaggcgttctggccggttcgcggtccgctccttcatcgatatggcgaacagctgcaaggtgaactacgttggaaagggatggttatcgccgcgtctgaaggcaccgaagtcagagccattgccgatggtcgggtcattctggccgactggctgcagggctatggactggtggtggtggtcgaacatggcaaaggcgacatgagcctgtatggctataaccaaagcgcgctggtcagcgttggcacccaggtgcgtgccggccagcctatcgcgctcgtaggcagcagcggcggtcagggccgtccgtcgctctatttcgaaattcgccgccagggtcaggcggtcaatccacagccgtggttgggaagataagttttgcttcaatttcgcgcaattgctcttgccgtagccggttcgctggctctggcggcgccagcgttcgctggcaaactctccatcgttattgacgattttggctaccgcccgcagaccgagaatcaggtgctggcgctgccggcaactatctccgtcgccgtgctgccgaacgcgccgcacgcccgggaaatggccactaaagcgcataatcagggccatgaagtgctcatccatctgccaatggcgccgctcagcaaacagccgctggaaaaagacaccctgcgtcccgaaatgagcagcgaggagatcgagcgcattattcgcgaggcttacggcaaagtcccttacgccgtcgggctgaataaccatatgggcagcgcgatgacctccaacctgtttggcatgcagaaggtgatgcaggccctggagcgctacaatctctattttctcgacagcgtcaccatcggcaacacccaggccatgcgcgccgcgcagggtaccggcgtgaaggtgattaagcgcaaagtgtttctcgacgatacgcagaatgaagccgatatccgcaaccagttcaatcgcgccatcgccctggcgcggcgcaacggttcggcgatagccattggccatccgcatccgacgacggtgcgggtgctgcagcagatggtctataacctgccgccggatatcacgctggtgcgcccgagcagcctgctgaacgagccgcaggtcgacaactcgacgccaaactacgcccagccgcctgcgcaacaaacgcagcagaagccgcgtaatccgttccatggcgtgaagtcttgcaaaccgaagcgcccgctggagcctgtgaacgccagccgcttcttcactatcctcagcgatagcatcagccagagcgcgctgatccagtactatcgcctcaaatggcagggctgggacaaccccggcaactagactactcaggggtccgttcgcttttgcgcgacgggcgcctggttatcttcgtgggcgtaccacgccttaaaatatttcagaaagctgtaaaacgtcgcgtacaggccggtcaccacgccgaccttgccatagcgccacgccccgctaaacagataccacttaaagaaagcgccaatggcgctgacgatcccccgcgtcagcgaaggtttgatctgctggtacttcaccagccgggtggtatagctgttcagcttattaaacacttcatgcagcgaataaaaggtatcgtggcgaacgaagcccggcagcctgacggagctcgcgtgtccgaccacctggtcatccaccggccgatcgttaaaccgcgcctgctggcggttaaagaggcgcaccggataatccggtgaggaaatggggtagatcgtccgtacctgtttgcctagcacaaaccagtagcgcggcagacgccaggcgcaggtcgggtcaggctcctcccccgcttttagcgcctgaatggccgtcaccacgtcattatcaagaatttcgtcgctgtccatgcacagcacccagtcatggctggccagcccgatggcatagttcatctgcgcgccgtgggctttataggcatggtgatggacggtgagaccaaactgctgacaaatagcgacggtttcgtcggtactgccggagtcgacgacgatacattcatcggccaccttcagcagaggcggcagcacctccatcagcaggcgcgcagagttacaggtcagtaagcatacggagagtttaagcatgatagttacaaagttaaactgcgactaaacacactgtataagcgaataaccgtaaaatcgatgtagaaattgtgcgcttaatattaagcaggctaaaaatgttatccaaatctaaattaaggcgcccgcaggcgccttttttgctgatttttacgccagcatgggggattagtcccagctcaaaaccactttaccggactggccggagcgcatcgcgtcaaaacctttctggaagtcatcaatgccgaagcggtgggtgatgatcggtgagagatccagaccagactggatcagcgccgccatcttgtaccaggtttcgaacatttcgcgaccatagatacctttgataaacagccctttgaagatgaccttggtccagtcgatggacatatccgacggcgggatacccagcatcgcgatacggccgccgtggttcatggtatcaagcatgctgcgaaacgccggcggcgcgccggacatctccagacccacatcgaaaccttcggtcatccccagctcggccatcacgtcattaaggttctctttggccacgttcaccgcgcgggtaacgcccattttgcgcgccagctcaagacggtactcgttgacgtcggtgatcaccacgttacgcgcgccgacgtgtttcgctaccgccgccgccatcacgccgatcggaccggcaccggaaaccagcacgtcttccccgaccagatcgaaggagagcgcggtgtgcaccgcgttgccgaacgggtcgaagatagacgccaggtcatcagagatattgtcggggattttaaaggcgttaaaggccgggatcaccagatactcagcaaagcagcccgggcggttgacgcccacgccgatggtgttgcggcacagatgggtgcggcccgcgcggcagttacggcagtggccgcaggtgatatgcccttcgccggagacgcggtcgccaatcttaaagccgcgcacttcctgaccaatccccaccacttcgccgacatattcgtgaccgaccaccatcggcaccggaatggtcttctgcgaccactcatcccagttgtagatgtgcacgtcggtcccgcaaatggcggtcttgcggattttaatcagcagatcgttatggccgacttccggttccggtacgtcggtcatccagatgccttcttccgctttcagtttggataacgctttcatctcatacccttattaggcgatgacgcccagttgtttgccgatgcgggtaaaggcttccaccgcacgctcaatttgttcaggagtatgcgccgccgacatctgggtgcgaatacgcgcctggcctttcggtaccaccggatagaagaagccggtgacatagatcccttctttctgcagctcgcgggcaaagttctgcgccaccaccgcctcgcccagcatcaccggaatgatggcgtggtcggcgccggccagcgtgaagcctgccgcggtcattttttcgcggaacagacgcgcgttagcccacaggcgatcgcgcaggtctgccccctcttcaaccatctccagcactttgatggaggcggccacgatggccggcgccagagagttggagaacagatacggacgggagcgctggcgcagccactcaaccacctctttgcgcgcggcggtgtagccgccggaggcgccgcccagcgctttacccaacgtgccggtgatgatatcgacgcgccccatcacatcgcagtattcgtgggagccgcggccgttttcgccgacgaagccgacggcgtgggagtcatcgaccatcaccagcgcatcgtatttatccgccaggtcgcaaacgccttgcaggttggcgatcacgccatccatcgagaacacgccgtcggtggcgatcagcacgtgacgcgcgccggcctcgcgagcttctttcagacgcgcctccagctcttgcatatcgttgttggcatagcggaagcgcttcgctttacacagacgcacgccgtcgatgatcgaggcatggttcagggcgtcggagataatggcgtcttccgggccgagcagcgtttcaaacaggccgccgttggcgtcgaagcaggaggagtagaggatcgcgtcttccataccgaggaaatcggccagcttcttctccagctgcttatgcgtatcctgggtgccgcagatgaagcgtaccgaggccatcccgaaaccgtggctgtccatgccggatttcgccgcggcaatcagttccgggtggttcgccagacccagatagttattggcgcagaagttaatcacgtggctgtcgccgacggtaatgtccgcctgctgcgccgaggtgatgatgcgctcttctttgaacaacccttcggcccgagcggtctccagattgctagttaactgtttgtagaaatcaccacgcattgcaactctccagattcggcaaaatttggcacatattacccaaagctatacgctgatacgagatgatgcaggcttgaatgaattatttgcagcataaatcacgtcagcccagcaccttattctgcgaatggctgtaggcttgctcatgtggtgatatgataagagcattcatgtccggattgtctccgggctctcaacttcaaaggtacagttatgatcatcgttaccggcggcgcaggctttatcggcagcaacatcgttaaagcgctgaatgacaaaggcatcaccgacattctggttgtcgacaatctgaaagacggcaccaagtttgtaaacctggttgacctgaacatcgctgactacatggataaagaagactttctgatccagattatggcgggtgaagagttcggtgaaatcgaagcaatcttccacgaaggcgcgtgctcttccactaccgagtgggatggcaagtacatgatggacaacaactatcagtactccaaagagctgctgcactactgcctggagcgcgaaatcccgttcctgtacgcctcctccgcggccacctatggcggacgcaccagcgacttcatcgagtcccgcgagtacgaacagccgctgaacgtttacggctactccaaattcctgttcgacgaatacgtccgccagatcctgccggaagccaattcgcagatcgtcggcttccgctactttaacgtctacgggccgcgcgaaggccacaaaggcagcatggcgagcgtcgctttccacctcaatacccagctgaataatggcgaaagcccgaaactgtttgaaggcagcgacggcttcaagcgcgacttcgtctacgtgggcgacgtggctgacgtcaacctgtggttctgggaaaacggcgtttccggcatctttaacctcggcaccggccgtgcggaatccttccaggccgtcgccgatgcgaccctggcgtaccacaaaaaaggcagcatcgagtacatcccgttcccggacaaactgaaaggccgctaccaggcgttcactcaggcggatctgactaacctgcgcaaagcgggctatgacaaaccgttcaaaaccgttgccgaaggcgtaacggaatatatggcctggctaaaccgcgacgcgtaagaaacaagcatgaaaatattggtggtaggcccgtcttgggtgggcgacatgatgatgtcgcaaagtctttatcgtacgctcagggcgcgctatccccaggcgattatcgacgtgatggcgccagcctggtgccgtccgttgctttcgcgcatgccggaagtgaacgaagcgatcccgatgccgctgggtcacggcgcgctggctatcggcgaacgccgcaagctcggccacagcctgcgcgagcgtcgctacgatcgcgcttacgtgctgccgaactcgtttaaatcggcattagtccctttctttgccaatatcccgctgcgcaccggctggcgcggcgagatgcgctacggcctgctcaacgacgcccgagtgctggacaaagacgcctggccgctgatggtggaacgctacgtggcgctggcctacgacaacggcgtgatgcgctgcgccaaagatctgccgcagccgctgctgtggccgcagctgcaggtcaacgaaggggaaaagtcgcaggcctgcagcgcctttaacctgtccaacgatcggccgatcgtcggcttctgccccggcgcggagttcggcccggccaaacgctggccgcactatcattatgctgcgctggcgaaaaagcttatcgacgatggctatcagattgcgcttttcggctcggcgaaagataacgaggccggcaaagagatcatcgccgccctcagcagcgagcagcaggcctggtgccgtaatctggcgggtgaaacccagctggagcaggcggtcattctgatcgccgcctgtaaagctgtagtgactaacgattcggggctgatgcacgtcgccgcagcgctggaccgcccgctggtggcgctgtatggcccgagcagtccggactttaccccgccgctgtcgcataaagcgcgggttatccgtctgattaccggctaccacaaggtgcgcaaaggcgatgccgccgaaggctatcatcagagcctgatcgacatcaccccagaacgcgtcctgcaagagctgaacgaactgttagcggaaaaaaccgagcacgaggaagcgtaacggatgcgggtattgatcgttaaaacctcctccatgggcgacgtgctgcacacgctgcccgcgctaaccgacgccgcgcaggctatccccggcatccgcttcgactgggtggttgaagagggtttcgcgcagatcccctcctggcatgaaagcgtcgagcgggttatcccggtggcgatccgccgctggcgcaaagcctggttttccgcgccgatcaaagccgagcgtcaagcctttcgcgaggccgttcaggcggtaaagtatgacgccatcatcgatgcccaagggctggtaaaaagcgccgcgctggttactcgcctggcgcacggcgtcaagcacggtatggactggcaaacggcccgcgagccgctggcgagcctgttttacaaccgccgccaccatatcgcgaaacagcagcacgcggtggagcgtacccgtgagctgttcgccaaaagccttggctacgcgaaaccccagacccagggggattacgccattgcgcgccatttcctgcagcacgaggctagcgctgccgcgccctatctggtgtttctgcacgccaccacccgcgacgataagcactggccggaaacccgctggcaggagcttctcgatctgctggccgacagcggcgtccacattaagctgccgtggggggccccgcacgaagaggcgcgggcgaagcggctggcggaaggccgggagtatgtcgaagtgctgccgcgcatgagccttgagcaggtggcgcaggttctggccggcgcccgggccgtcgtctcggtcgataccgggctgagccatctgaccgccgcgctggataaaccgaactttacgctctacggcccgaccgacccggggctgattggcggatacggtaaaaaccagcatatcgtgcggccggaaaacagcgccagcaccggcgatattgcggccagccggattcatcttctcctgcaaaatcaggggctgctctgatgggatccctgtttaagcagatctaccgctatacgcgccctcgcgcgtatcgccacaatgaaaatctgtggccttttacccgtattacgcgcgcgccaagcggcgaaatcagcgcgttacgctataaagggaaaacggtgccgctggtcagcctgagcgcgctgaaaaacagtatgcagggcgaagtcctgctgaccgccaccggcccctcaacccgcaatatcgatttttccctgttgtcgaaaacgatcccggtgatgggcgtcaatggcgcctggcatcttgccgaccggctgcacttttcactctataccatcgtcgacatggaatttttcgataagaagccggacattatccgcgccattgtcagccagccggatattttgctgttcaccaccatgcacgggatcgccaaaatcgtcgatcgctatggggacgcgctgcgctgccgtttggcgttgattgaggacggttgctataagatttaccagccgaaagtcgccagcgaagcgataaagcgcacttaccagcagaatgcggcgatgtgctttcatcctcagcgcccggatatctgttttagcaccgatattcgccagggcatctttgatgccggcacggtggtctactgggcgctgcaaattctcgcctggctgggcttcaatactatcctggtgagcggcctggatatgaccaactttaaccagccgcgattctacgaaacacaacaagaaaaattgccttcttacctggcaacaaaagtggataccctcgtcatgccctcctttgcgcatgccgcgcaggtactgcagcaacgccagattcgggtgattaatttttccccagaaagcgctgtgccggatactatcttcgaaaaggttgcgtttaatgagtactttaaaagtgagtaacttcgccagacagggttactcgattgtctttcctttgtttttatttttcagcgcgattttttgcatgtccacccggaccaataatctgctgcatttatcgatcctgctgctattgctgtcgctggtacgccaggaaaaccgccaggcgctggccggggtgttacgcgagcagtggcagacctggacgctgctggcggctttctttatctattacgccctcagtaatgtgtggggccatacgccgcagcatattgactcgccgatcacccacggcgtgtatctgaccgggtatctgttgctgatgacgatgctgctcagggacggacgaacccgccgactggcgatgctggcggtggtcggtgggatcaccgtgctctccctgtggacgctgattatcgaccatacgctggttctcaccgaacgagcggtctcccccgagaaccccggaccaacgaacgttatcgaccttgccggttactgcggcatcggcattttaatttgcggcatgctactgaaagaaaaagccagccactggctctatctgccggtggtcatcatgctggtgatgctgctgctcacccaaagccgcgggccgatcatcgccctggtgctggcggtcggctgtacgctgcacctgcacgtcttcacccgccgcaacctgctgatcgccgcggcgctggccgtgctggtagcgctgcttttggtcatgacgccggtgggcgacatgctgctcgcccgtttcgaggagctgggcacccaaagcgggctgcgcctgagcatctggcaccatacgctgtcggagatggccagccagccgtggctggggcgcggtttcagctatgaactggatttcatcaactacagcggcgagcacatcaccaccacccacagtgtgtatatgggcgccctgctgaaaggcggcatcgtggggttactgctgctgttggcgatcattgcctgcgggctatggcaggcgtggcgcaagcgccataccgacagccgctacagtctggcgatcctgttttacgcgctggtgtttatggcctcgcaggggatgtttatcatcagcaatccccgggaaacctgggtgctgttctggctgccgctgggcattgcgctcagcaaagggttggcggaaaaacgctaacaaaaagggccgtcagcggccctttttatattaactttttaaatcaactgcgggcggcgaccagccggtcggcctgctctttaatcacgggccacaccgactcaatcgccacatcggcgacattcgcttcttcacagactatctgcttcgccttgtcatagcccggcgcccagatgtgatagccgggcagcccggtattcttgagtttgcgtttgttatagaccgccaccatcggcttatcgaaagcccgggcaatatgcacgatcgaggtgtccggcgtaatgactaaatcacagctgcggatcacttctacggcggagttgatggtgctgtcggcgatgtacagcgccatatccagccccagctggcggattttttcactgcgccccaccatcacgatacagacccggtaaggcagagcatgtagccgctcgaccagggtcgccacctggtgacgacagaagtctttatcctcggaggcggtaaaagggttaatggcgatacgcagttcgacctctccggcctgagaaagcaagcgggccactttctcccgctcatggcggcagccggggagatgatagtgatacgggcggtcgtcaacgatgccaaacagcttcaccacctgcttatagcgcagggaaatatggctgttgccgtcaaaaaaagcgattgagtgatcgtaaagtttatagggctctttattaaaaccaatcacgctggtcgcccgtaaatcggcgagtaatttaaagcgttcatagctggtcacgtcatcaaaatcgataaccgcatcaaaacccgccgcccgcaacgtatttaaggacatgcgaggccgatataaatatacttgctgaatgaattctgagcctgctaatatttcgctgcatattggtccggttaacaccgaaacctgatatccccgttcggccagtattctggcgcagccggtcgtgaccaccatatcaccgactttatcatccagacgcaatagcagcacgcggcgcacagccgctgggtcgaaggctttacgcgccggcttatttctgtatcgatagttaattaaattaaatttaatgccgcggaaaaaagcattctttttccgcgttaattgtttaaggatacgcatacggtaccttgagctgtgttagcgctgtgtaattttccgctggtaatattctgccagcgtcatgcccttcacctgcggcgccagccagctaaaaaaggcttcgaggtcagcgtataaacgctcaatatcccgttcattctggaacgtggggctgccgccgggcatatactctgaagagtggagcatatattccacgtagtcattgccctgcgtcaacgtttgttcgacgacttttttcatcgtctccacattgccgcccatcggtcgcagccagtgtacggagggggatcgcactttgccgcgcaggcggtcgtagccctgcttcacgctgttcatccacgctgagtgcttgtactggatgctcatcggcacttccagcagcggcgagtggccctcgcggctgatgtcattttcatcgaggaaataggcatgctgcggaaagcggcgataatcggtcccgccatcgccctgcggcgcccccttggcggtcttccagttcacccgcggggtcaccgagcaatccacctgatacccgtattccaccagcagacgcgcatagcgctcgtcaaaagcccagcgcccggcgcgatggctaaccattttggtctggaaggtatcctccagcagacgcgtcatatagtcgaccttctcacgcatcatagcgtcgctgtattcaataagataaggcttatggcgccagtcatctgcagtcagcggctcggtcggcgggctgttccacgcatgcagatgcatgccgacttccgcggtgccgcgggcaatcacgtctctggcgaattcgatataaaaggggtcgatggccatttcatagttggtcaaatagaccggtttaaagccatacttttcgcaaagctgctgaaaacgcggaagataacgcgcattctcggtggtgatgctgtcatgtttttgccagaggttatcgccctctgtatcaatcgtaatgagaaatgcgggattgtgcacgaaaacgtcctcaggccatacgtatcgggtcatggtagagcaatacaacgcttctctcaatctgtctgatcccctagaatcggaacccttatcctggatgaagaacagagtatgacgcctgaaaccctctcccgcggcccgttgaacccggcgcggatcctggtcattaagctgcgccatcatggcgacatgctgctgatcaccccgcttattcacgcgctgaaacagcagtaccccgccgccagcgtggatgtcctgttgtatgaagagacccgggatatgctcgcagccaaccccgatatccaccatatttatggtctcgatcgccgctggaaaaagcagggaaaaaggtatcagctgaagatgcaatggcagctcattcagacgctgcgccagcagcggtacgatatggtgcttaacctggccgaccagtggccgagcgcggttatcagcaaactgaccggcgccgcgacgcggattggttttgattttccgaagcgccgccacccggtctggcgctattgccacaccgcgctggcctccacccaacagcacaaccagctgcatacggtacagcagaatctctctattctcgctccgctcggtctccagttgaacgaagcgccggcgcggatgggctacagcgaagcagactgggccgccagccgcgccctgctgccggaggacttccgggaacactacatcgtcatccagccgacgtcgcgctggttctttaaatgctggcgcgaagatcggatgagcgccctgatcaacgcgctgtccgccgaaggatacgcggtggtgctcacctccggccccgatgctagagagaagaagatggtggataccatcatcgccggctgcccgcaggcgcgactacactctttagccggccagttaacgctgcgccagctggcggcggtgatcgatcatgcccggttgtttatcggcgtcgactcggtgccgatgcatatggctgcagcccttggcactccgctggtcgccctgttcggcccctcgaagctgaccttctggcgtccgtggcaggcgaaaggcgaggtgatctgggccggcgacttcggtccgctgcccgatccggacgctatcaacaccaacaccgacgaacgttatcttgatttaattcctaccgacgccgtgatcgcggcggcgaaaaaggtactggcatgagtaaattcaggctggctctggtgcggcagaagtaccgcccggacggcggcgcagaacggtttgtctcccgcgcgctggaagccctcgacagcagtcatctgcaactgaacgtcatcacccgcgaatggcaggggccggtgaaaccggactggcagatccatatctgtaacccacgtaaatgggggcgcatcagccgcgagcgcggctttgccaacgccgcgcgcgcgctctggcagcgcgagtccttcgacctggtgcagagccatgaacgtattcccggctgcgatctctaccgcgctggcgatggcgttcatcgccgctggctgcagcagcgctcgcgcattttaccggcctggaaaagccgcctgctgttcgccgaccgttaccaccgctacgtcatgcaggcggaacgcgagatgtatgaagactcacacctgcgcggggtgatctgcaacgccgagatgatcaagcgcgagattatcgaagactttggcctgccggcggagaagatccacgttatttacaacgccattgacaaccagcgcttcctgccgccagacgaagagacctttgccgccttacgcgccaaatggcagctgccgctgcaggcgacctgcctgatctacgtcggctccggctttgaacgtaaagggctggcggcggcgatccgcgccatcgctcccaccgatcgctacctgctggtggtcggcaaagataaggatcagccgcgctatcaggcgctggcgaagagcctgaactgtgaagcgcgggtgcgcttcttcggcatgcagtcggagacattgcccttctatcaaatggccgatggtctgctgctgcccaccctctacgatccgttccccaacgtcatcctcgaggcaatggcctgcggtctgccggtgatcaccactaccggctgcggcggggcggagtttatcgtcgacggccacaatggttacgtctgcgacgctctggatatcccggcgctacagcaggcggtaatggccctgcccgcgcgcgcgctgggctccgcgcaaggcggtcacgcccgcgagcgcattatggcctgcaccagcgagcgactctcaacccagctgctttctctttatcaggatctggtgaaataacgatgcgcatcttatttgtgattgacggtttacccggcggcggcgcggaaaaagtggtcctgaccctggcggcacagttcctgcgcgacggcgatcgggtgtcgctcatttcgctgcgcgatgtctgcgagtacccattgcccgaggggctcgactaccaggtagttgccgatcgctgccgtaaaccgtggcgcaagctgaccgagctgtcccgccgcgcccgccagctggatgccgcagtcgtgcgggccgaacagcaggggcaatttgaccttgtgctctccaacctgcacaaaaccgaccgcatcgtcgcccgcagccgggcgctgcgcgagcgtaacgtctggttctgtctgcacggcgtattctctgcctcctatctcgggcaccgcaccggctttgaccgctggatgaagcagcagaaaattaagcgaatttatcagggtcgcaacgtggtgacggtttccgacgcggtggggcgagatctggtggaagagtttgccctgcgcccggcacagctgaaaaccatctacaatcccttcgatatcgccgccctgcgcgccgaggcggaagccgatagcgagcgcccggacggtgactacctgattcacgtcggtcgcttccatccgggcaaacgccatgaccgcctgcttgaagcctatgcgcagagcggcatcgacgcaccactggtgctgctaggccagggaaaaccggagcaagagcagcgcctgcgccagctggcaaaaacgctgcacattgacgatcgggtgtggttcaaaggctttcagaaaaaccccttaccgtggatcaaaggcgcacggatgctggttttgagctccgatagcgaaggattcggcaatgtggtggtggaggcgctgctgttacatactcctgtcgccagcacccgctgccccggcggcgtcaccgagatcctcaccggcgaacttgcccgcggtctggcggatctgaccagtccggcgctggctcagacgatgcaaagcatttaccataacccgccggccatcgacgatgccgcgctggaaaaattcagcgtcgtatccatttgtcagcagtaccgtcagctgcagcgcacctgacgccgttagttaaccaggatcgaagatttatgagtcaaacgcctttattgagcatcgtggctgccgtctacaacggtgagaaatttctagcgcaattctttgagtgcattgaacagcagcagctggacagctatgaactgatcctggtgaacgatggttcgacagacaacagcctggcggtgatcgccgaatggcaggagcggctgcagaacgtccaggtgctggagcaggaaaaccagggcgtctcggtcgcgcgcaataccggcctcgccgccgccagcggcaaatatctcgcgtttccggatatcgacgacaaactctatccgggcatgtatcgcacgctgctggagatggccgagaaagaacatctcgatatcgccacctgcaacggcacctatgtgtacgaaaagcgccgcgagagccacccgatcttcccactggatcgcctgccctcgacgggtgtgctgccgggccatgtctggcttaagcaggccctggactcgcggaagtttctgcacgtcacctggcttaatatttatcgtcacgactttatccgccagcatcacttccatttcgagcctggcctgcgccatcaggatatcccatggaccacagaagccctgctggccgcggagcgcgtgcagtacaccagtcagcagttctatgattactacattcactctgagtcggtgtcgcataagccggacaacgacgacacgctgatgcgttcggcgcgccactatatgaagattctggagatgctggaggcgattaaccagcgctacccggataaagtacgccatatcgccgcctgtcgctggcagatcgccaaagaaggcctggggatcatccataccttcgatagcatgaaagatgagtccaaaaagcatgttattattaacgaattcttcgaccgcggtatctggcggttaatctggaaaaacgcctgtactttccgtttacgctggcgcctgggacgccgttatctgcgtattaagcgttatcgccacgcgggatagaccaaaaacccgctgtttccgccaaagagatagctttacgcgggctaaatgcttagaatttgcccgccaaaacagagaacggataaatagtttggaattgctttataccaccctactttaccttattcagccgctggtgtggctgcggctgctgctgcgcagtcgtaaggctcctgcctatcgcaaacgctgggcggaacgctatggcttctgtcagaacaaggtagagccggatggcattctgctgcactccgtttccgtcggcgagaccttagccgccattccgctggtccgcgccctgcgccatcgctacccttctctgccgatcaccgtcaccaccatgacgccgaccggctccgagcgcgccatgtcggcgtttggcaaagatgttcatcacgtctatctgccctacgatctgcccggcgccatgaaccgcttcctgaacaccgttcagccgaagctggtgatcgttatggagaccgagctgtggccgaatatggtggccgcgctgcataagcgtaagatcccgctggtgatcgccaacgcgcgcctgtccgaacgttccgccaaaggctatgccaaactgggcggctttatgcgccgcctgttgagccgcattacgcttatcgccgcgcagaatgaagaagatggtaaccgcttcctctccctggggctgaagcgcaaccagctggcggtcaccggcagcctgaaattcgatatctccgtcacgccagagctggcggcccgggcggtgacgctgcgtcggcaatgggcaccacaccgcaaggtctggattgccaccagcacccacgacggtgaagaacaaatcatcctccaggcgcataaaaaactgctggaggctttcccgaacctgctgctgatccttgttccccgccatccggagcgcttccctgacgcccgtgagatggtacaaaaggctgggatgagctttactctgcgcagcacgggcgagatcccctcctccagtacccaggtagtcattggcgataccatgggcgagctgatgctgctctacggcattgccgacctcgccttcgtcggcggcagcctggtggagcgcggcggccataacccgctagagccggcggcgcacgccattccggtgctgatgggtccgcataccttcaacttcaaagatatctgcgccaagctgcagcaggacgatggcctgatcaccgttaccgatgccgattcgctggtcagggaggtgtccacgctcctgaccgatgaagattaccgtctgtggtatggccgtcacgcggtggaagtgctgcatcagaaccagggcgcgctgtcgcgtctgctacagttactgcaaccttacctgccgcagcggagtcattaatgtcgaaccggctttccgtggtgatgatcgctaaaaacgccgccgacctgctgccggattgtctgggctccgttagctgggcggatgaaattatcgtcctcgactccggcagcaccgacaacaccgttgagctggcccgcggcctcggcgcccaggtctatacccataccgactggcgaggctatggcattcagcgccagcgcgcgcaggattacgccaccggcgactgggtgttgatgatcgataccgatgagcgcgtcacgccagaactcaggcaggctattcttaaggtactggacgccccccagcgcggcgccatctacagcatcgcccgccgtaactattttctcggacgctttatgcgccacagcggttggtatcccgatcgcgtcctgcgcctgtacgaacgcgcccgttaccgctataacgataatctggtccatgaatcgctggatagcctgggcgctgaggttattccgctgaccggcgatctcctgcacctgacctgccgcgacttcgctggcttccagcaaaaacagctggcgtatgccgccgcgtgggcgcttgagcgtcaccagaagggcaagaagacctcgatggcagggattttcagccatacgctgggcgcgttcctcaagacgttgctattgcgcggtggggtgctggacggtaaacagggatggttactggcgatggtcaacgcgcagtatacgtttacgaaatataccgagctgtgggcgctgagccacggctactcggagaaagagtcatcatgagcacaaaagcgatctatccgggtaccttcgaccccatcaccaacggtcatatcgatattgtcacccgcgcggcaagtatgttcgataaagtggtgctggctatcgccgccagcccgagtaaaaagccgatgttcagccttgatgagcgcattgcgctggcagagcaggcgacggcccacctggtgaacgtggaggttatcggcttcagtgatttgatggccaatttcgcgcgcgcgcagcaggccaatatcctgatccgcggcctgcgggcggtggcggatttcgagtatgagatgcagctggcccatatgaaccgccacctgatgcccacccttgagagcgtgtttctgatgccgtgcaaagagtggtcgtttatctcttcctcactggtgaaggaagtggcgcgccaccagggcgacgtttctcactttctgccagctaatgtgcatcaggcgctgttgaataagctgaagtaacgcatctgccgggacatgagccacgtcggctggcgcagcactacgccgctgggccattcacaccggctctgtcccggtctttgtgccagatggcgctacgctgacctggcctacaaacgcccccggcccaccagatgcgcacccgcaggcccgctgacctggccgacaaacattcctgttcctgagactacttctggcactgacggcaataaaaggtcgcccgctgggcatgtttggtcccgacgaccggcgtgccgcagatccggcagggttcgcccttgcggccatagacctgtagctcctgggcgaaatagcccggcttgccatcgctttgcaggaaatcctttaacgtggtgccgccctgctctatcgaacgcagcaggaccagcttaatcaccttcaccagctgctcacactcttcccgcgacagcgaggacgccagccggtcaggatggatcccggcggagaacagcgattcactggcgtagatattccccacgcccaccaccagcttgttatccatcagccagggtttgatcgcggttttcttcttcgcgcatttttgctggagatagtcggcgttgaacgcgtcgctgagcggctccgggccaagatgagccagtaccggatggccttccagcgttctggtccacaaccaggcgccaaagcggcgtggatcggtgtagcgcagcaccttgccgttactcatgaccaggtcaacgtgatcgtgtttttcagcaggcagctcttcgctcaggatgcgcaggctccccgacatcccaagatggacgatgatccagccgtccgacagctccagaagcaggtatttggcgcggcgacgcacgctgagaaccggaacgtcgctcaggcgataaatctcttcggaaaccggccagcgcagccgtccgttgcgcacgacggcgtgcagaatggttgcgccaaccaggtgcggctcgatgccgcgacggctggtttcaacctctggtaattcaggcatgattttcctccgtttacccgacgtattgtgcttcacggacaggtgactgaaaagggagtatgtgaaagcaatatgggggagttttaaaaacaaaaaaccccgccgaagcggggtttttatacaaggaggctaaaattatttgattttagcttctttgtagataacgtgctgacgtacaaccggatcgtactttttcagttccattttttccggtttggtacgtttgttcttcgtggtggtgtagaagtgaccagtaccagcggaagaaaccagcttgattttctcacgaatacctttagccatgatttatttcctctaagtacttagtacttttcgccacgggcacgcagttcagccagaactgtatcgatgcctttcttatcgattacacgcatacctttagcagatacgcgcagggtgacaaaacgcttctcgctctcaacccagaaacggtgagagtgcaggttcggcaggaaacggcgtttagtcgcgttcagtgcgtgggaacggttgttaccggtcaccggacgcttgccagtaacttggcagactcgggacatgtctattctccaaaaatcaaattagctcgagcttcgtatggggtattggcgcctcgtcaggctttacagcctggtcatcgcagttcaatgtgaactctcgactgccaggcccaaatgccaaacccgagattctcaaaggtggcgtagtatacgctgactcggcgatgtgctcaagtcccgaacagacaaagatcccgaaggatcgccagttcggggctaaatccagccacgttcggcaaaagatacatacgcaccgcggccgataaccagatgatcaagcacgcgtatctccatgaatctacaacattttatcaccctttcggtaatcagtctgtcggcctgacttggctccgggctaccggagggatgattatgcgcaaggatcacggcggcggcgttcactttgatggcttcgcgtacaatttctcgcggatgcacctcaacgtggctaagagtaccagaaaaaagacgactatgtttcaacacccggttctgattatctaaaaagatcaccataaagatctcgcgctcctcttccgtcagctggctttgtaaaaactcgcgcgtcatcgagggcgtgaccagcgcggcctcctcgaccagctgcgagctaaaatagcgtcgcgccagctcggcaatgcccttcagttgggcatatttcgccagccccagtccgtctacagcaatcagttgcgctttatcagcggaaagcagagcgtagagtgagccaaaacgctgcagtaacgcctgggcatagctgagcacatcctgacgacgcgtgccgacgcgcagaaacagcgccagcagctcaacatccgttagcgtttcgatgccgtattgcagcatcttctcccgtggcatcagattttccattccgtccatgcgccctcctgggtgaatcagcctatcctggcacagcctgacggcgctgccgacccgccgattttcaccctgcgtagccgctcgcaaagtgaatgcccggcagaggcacgacggcggcaggattgtgataagatgcgcggattctggtctacggcaacaggaagacatcatgatgactctggcgggtaaaaaaatcgtcctgggcgtcagcggcggcatcgcggcgtataaaaccccggaactggtgcgccggctgcgtgaacgcggcgcggaagtgcgtgtcgcgatgacggaggcggcaaaagcgttcatcaccccactcagcctgcaggcggtatccggctatccggtttccgacagcctgctcgatccggcggcggaagcggcaatgggccatattgagctcggtaaatgggccgacctggtgatcctcgccccagcgaccgccgatttaatcgctcgcgtggcggccggcatggccaacgatctggtgtcgacgatctgtcttgccactccatccccggttgccgtggtgcccgccatgaaccagcagatgtatcgcgcgcaggccacccagcataatctgcagacgctcgctactcgcgggctgctgctatggggaccagacagcggtagccaggcctgcggcgacgtcggcccggggagaatgctcgatccgctaactatcgtagacatggccgcgcagcatttcgcctcccctgtcaaagatttgcaacatctcaacctcatgattaccgcgggcccgacccgtgagccattggatccggtgcgttatatcaccaaccacagctctggcaagatgggcttcgcgattgccgccgccgcagcgcagcggggcgcgaacgtgaccttgatcagcgggccggtatcgctaccgaccccgccgtttgtgcagcgcattgatgtcactaccgcgctggagatggaagcggccgtccaggctggcgcccagcagcagcacatttttattggctgcgccgcagtagcggattaccgcgccgccgtcatcgccgaagataaaataaaaaaacaaggtgatgaattaacaataaaaatggttaaaaacccggatatagtggccggggtcgcggcgctaaaatcacatcgcccctacgtcgttgggtttgccgccgaaacgaattatgtggaagaatatgcgcggcaaaaacgtgcccgcaagaacctcgacctgatttgcgccaacgatgtttcccagcctaatcagggctttaacagcgacagcaacgcactacaccttttctggcaggatggggaaaagcgcttaccacttgagcgcaaggaactcctgggccaattattactcgacgagatcgtgacccgttatgatgaaaaaaatcgacgttaagattctggacccgcgtgtcggccagcaatttccgctgccgacctatgccacctccggctccgccggacttgacctgcgagcctgtctcgacgacgccgtagagctggcgccgggcgcaaccacgctgttgccgaccggccttgcgattcatatcgccgatccctctctggcggcggtgatcctgccgcgctccggcctgggtcataagcatggcgtagtcctgggcaacctggtgggccttatcgactccgattaccaggggcagctgatggtgtccgtctggaaccgcggtcagcagagctttattatcgagccgggcgaacgtatcgcacagatggtctttgtgccggtcgttcaggcggaatttaacctggtggaatccttcgatgccaccgaccgcggcgaaggcggcttcggtcactcagggcgtaaataagcccagcaacacggaatctgcatcccaacgcgcataacgcaataacattaccgcaagccctggtttgcggtcgcgttgtggatgtctgcctgacaagtgcttattttcaggggtattttaaaacatggcagaaaagcaaactgcgaaacggaatcgtcgcgaagaaatacttcaatctctggcgctgatgctggaatccagcgatggtagtcagcgtattaccaccgcgaaactggcggcttccgtcggcgtctctgaagccgcgctgtatcgccattttcccagcaaaacccgcatgtttgacagcctgatcgagttcattgaagacagtctgattacgcgcatcaatttgattttgaaagatgaaaaggacaccaccgcgcgcctgcgcctgatcgttctgttgattcttggctttggcgagcgtaatcctgggctgacgcgtatcctcaccgggcacgcgctgatgttcgaacaggaccggcttcagggtcgcatcaaccagctttttgagcgcatcgaagcgcagctacgccaggtgatgcgcgagaaaaaaatgcgcgaaggcgaaggctacaccctcgacgaaaccctgctggccagccagctgctggctttctgcgagggcatgctgtcgcgctttgtgcgcagcgagttcaaatatcgtccgacggatgatttcgacgcccgctggccgctggttgccgcacagctgcagtaatcttcttctgagatgcccggtagcgtgacgcttaccgggcgtatgtcttagacgccgtaggcttcacgataggcgcgaactgacgccaggtgttccgccatctcgggtttctcttccagataagtaatcagctctttcagagtgatgattgagataacctggcagccgtaatcccgctccacttcctgaatggcggagatctcgccgcggccgcgttcctgacgatccagggagatcagaacgcccgccagctgcgcgccctgggcctggataatctccatggattcgcgaatcgccgtaccggcggtgatcacgtcatccaccagcattacccggccctgcagcgggctaccgaccagattgccgccttcgccatgggtttttgcctctttgcggttaaagcagtaaggcagatcgcggtcatgatgctcggctaacgccaccgcggtggtggtggcgattgggattcctttgtaggccgggccaaacagcaggtcaaactcaattccggaatccaccagcgcctcggcataaaaacggcccagcagagccagatcgcgcccggtgttaaacaggccggcgttgaagaaataggggctcttgcgcccggatttcagcgtgaattcgccaaacttaagaacctgcttgctaagcgcaaactcaataaactggcgctgatacggcttcatggattcgctcctttggtacttttcatcattgtcagactgcgcgctccccttcgcaggtgtgatgaaggataaagcgcaaaaaaaaggcgacttctcagtcgccttaatcattaattttctaacgccgccttctgcgtcgtgataatggactcgatcccccctcgggctaacgccaggagagtgaggagttcttcatgggtaaacggctcaccttccgcagtgccctgcacctcaataatacggccatcttcggtcatcaccacgttcatgtcggtctccgcggcggagtcttcgatgtactccagatcgcagatggcttcgccatttacgataccgacggagaccgcggccaccatccctttcatcggattggttttcagcttgccggcggcgaccagcttattcagcgcatcggccagcgccacgcaggcaccggtaatggaggcagtgcgggtgccgccgtcggcctgcagtacatcgcagtcgagagtaatcgtgaattcgcccagcgctttcaggtcaaccgctgcgcgcagcgcacgggcaatcaggcgctgaatttccatcgtccggccgccctgcttgccttttgccgcttcacgcgcgttacgcgtgtgcgtagaacgcggcagcatgccgtattcagcggtgatccagccctggccctggcctttcaggaaacgcggaacgccttcgtcaatagaggcagtgcacagcactttggtatcaccgaattcgaccagcacggagccttcagcgtgttttgtgtaattacgggtcagggtgacgggacgcacctgattagcgctacggcctgctggacgcatgatagaaatctccggcttgaaacgaatgtgagggcgcattatacgaatttcatggcaaaaagcctatgcccactccagccggacgcgccgataatgtcagtccagcgttttacgataagatttcaaccccacgccaatgacaatcaccgccaggcctatcagcggcaagaggtcaggcaacaatgccgttgctgaatagcctttcagcataatgcccttaaccaggcggatgaagtaggtcagcggtaaacaggagccaatggctttcgcccagtcaggcatactaataaaggggctaataaagccggacagcataatggaagggataaagtaaaaagaggacatttgcagcgcctgcagctggttttgtgctaagccagaaataccgataccaattgacagacaaagaaagacataaattaacagcacaaaaaatagtaggaagacgctaccgtgaagggggatatcgaacaacaaaacggcggcaatcaggattaacgtcgcctgaaacagaccaatgataacaaaaggcgttattttcccaataatgacctcaagcccggacaacggagagaccagtaaattttctaacgccccgttttctcgctcgcgggtaatagacagggcggtcatcaggattaacgttgtactgagtatagaccccataataccgggaatagtattaaactgggttatcccctcagggttaaacatgcgatgaatgataagctcgaaatcatcctctttttgcaccacacgcatgtcgcccggcaaatcgtgctgaaacatcgacttcgccacctgcacaagggcgctgagcgcattccccgtggtgatcggatcgatggcatccccctgaattaatagttgtggcttttctccacgcagtaacttgcgcgtaaacccctcagggatcgtcacgataaaagtgacatccccccgcacaaaggctttctgcgccgcctcttctgaatcgacaggaatcatcgaaaaatacccggtattttgcgcttccgtcacaaagatttgactcatgcgttcggtatcataatttagtaaggcggtcggaagattatgcggatccatattgatggcatagccaagaatgatcagctgaaaaagaggtgtcaggagcaccatactgatgctgactttatcacggcgtagctcgtgaatttccttaataaccacgccaatccaccgcgtaacggagaagctaaaattaatttttttcacaattatttttcatcaagtaggtaaatgcatcttccagattggtatccaccttacagaactcataaccctgttgcgtaaaggcaaaaagcgcggattttaacttcgcttcatctctggatgtaatataaagctgattgccaaaaatgaccgtttgctcaatatccggcaagcgctgtagctggctttcaagcagcgtcagaccggcgccgctggttcgcatggtgatcaaattctgggaggctataatcgacgcaatagtgccattcgccagcagccgaccatatgagagataggcaaccttatggcagcgctcagcctcatccatataatgcgtgctcaccagtatcgagatcccccggtcagagagctggtgcagcatttgccagaactctcgccgcgccttgggatccacgccagcagtcggctcatccagaaatagcaaaacaggttcatgcaacatacaggcggcgagggccattctttgcttccagcccccagaaagctccttagccagctggtgctgtcgggcagtgaggcctaactcagaaagcgcacgttcaacccgatctctacgccgatcgaggctatataaccgcgcaataaaaagtaagttttcccgaatagttaaatttccccacattgagaaatactgggtcatgtagcctatctttttttttattttttcccgctgcgtaaagatatccatacccagacaagtaccttcaccggaatccggcgtaatcaaaccacacatcattcgaatcgatgtcgtttttccgctaccgttcggaccgagaaaaccatagatctcgccttttgccacctgtaaagagaaatcctttacgacgtgatgctcgccaaaatgtttattgagattttttacatcaatacaaagattattcatcgccaataatctccacatcaaacggttggccgattttcatccgccctgcctgctgcagcgcagggatagcctccgccataaaaatgagcttctcacgacgtttcgtactataaataactggaggcgtaaactcggcctcagggctgatatagttaataacgccagcaatgggctcagcgcaaccatcgcatataagttttaccttagatccgattttaaatttaccgagcttcgcttcgggtataaagaagcgtacttttatattctcaggaggtaacagactgattattggtttaccagcagaagggcgctccccggcacgataaataatatcgaagactttagcattgaccggagaaacaatcgtcgtttgctggacatcccacagcgccttatcccgttcgagttttgccgcggccaccattgagcgctgcttgctaatctcatcctgccgggcagggagttgccgtgctttgagttgattaattaactcttcaacctgtgcgcctttttgagttaattcatcccggatatcctcccattccgcaagcgatatggcatgattggcgtaaagattacgatatcgcccaagctgccgctttacctgggattctgccgattgtgcttttttaatctgcgaacgtataatatccagctcttcaggccgttctccagattccagatttcgtaatagagcgctctctgctgatagtttttcctcagcgcgcaggaaaatattttgcgcatcgaaggactcaatcttcactaactcctgtcctgcggcgacgttatctcctttattgatcaagatccgttctattttttcattaccagaatatgaaaggtatacaaattctccatgtgaataaccggataacatgttatctggtttgttatcacacccggtgagtatcagcaccgatatcagtataataaatacatttattggctttcgcattaaaacgcatccatacgcatatcatttcccttatcactacggtctggattgaggcacgctcgctccaggaccggacaatcatcgtcagtttaatctcttaaataatgcttaacgtagctttcattcaatttatctatagagctcagatttaacccagctatcgaattaaaagaataatcttttgtgaatgcaagaatcgacgatccgcccggggagaaccatttagcactctgtttaaaaggccagggaagttcataaccttcttctctcagcaggtgattaagcatgctccagtctgctctaaaatcttcgccacaaaatggagtatcatcctgtacattttcggcagtgaacaatgctatcggcgtacaaaaatcagctgtcgaggaaaagtatatattatagaaactgatgatgagtttctgtactttttcaggaaaagttccaggaatggtcagcacacccagcaagtatttatagtccggatatctttttataaagtcaaatatcccttgccataaataatcaagcaccttacttttttgataaggtttctgaataaagccgcggccaatttccacacacttctctaaacaggaataggcattatcatggtatttaaacaagctgttgctatagaggcctgttacaccatgttgggccagctgctcgccaacgggcataacacgatatgctcccaggatttccacatcagaaggatcccacaaaatgatatgataataactttcatcaaaaacatcgttatctcggtcgttaccagttccggcaccaatatcgcgataacagcgttcgcgtaagcgccctaactcatcaataataggtgaggttcggttagtattacagcgatatatcactagttttctaccgtcttcaaactgccttaatatttcgcactcctctattgcgctaattagctcctttttacctggttctaattcttgcggcgcaatcgtatctaacatagccgggccattcttcgctatactctggaggtgcgtcaaacatacatttgccgcggcagaaagatctttattgtattctttaaacgaggataaggctatttgctgtcctatattgattttcatggtcttgccatgatggcggagagcttcacgaataaccatcatattcgacagttgccgccagaatgttgcagtaagataataaatcttactgtttgctcccgtaatatgaattggtaccaatgctgcattatttctcatagcaagctgtaaaaaaccggggttccacttatgctcctgtaacccggaaagagaccagttagccagcttacccgcaggacatataatcaatacgcctccttttcgcaggtgatcgttcatctcgcggaattttttatggctcatcttaccggccatattctcaattccaatggtaagttccgatacctgggggaatataattggcaaaacgtgattggctattatttttatatcattcctgactcgggagaccgtatgtattaagctaagtccatcgataaccgtcggatgatttgaaataacaaccgtagccccatgctcaggtatgttgttaaattggtggtgttcgctttcacatttcaactcaaggagttcaacaactgcattaacccactcgaccccatttttattaaggaaggtgcgaataagcaggtcatttcttcccaagctgactcgctgattaaaatttcgcggatctgggccgatttttttcccgcaaacacatcgaatcagcctatttaggctattttttccaccatttctggcgttatttccggtttttactgagatctctcccactgacgtatcatttggtccacccgaaacaggttggccagggtgaataacatcgccagttggttatcgtttttcagcagccccttgtatctggctttcacgaagccgaactgccgcttgatgatgcgaaacgggtgctccaccctggcacggatgctggctttcatgtattcgatgttgatggccgttttgttcttgcgcggatgctgcttcaaggtttttaccctgccgggacgctcggcgatcagccagtccacatccacctcggccagctcctcgcgctgtggcgctccttggtagccggcatcggctgagacaaattgctcctctccatgaagcagattacccagctgattgaggtcatgctcgttggccgcggtggtgaccaggctgtgggtcaggccactcttggcatcgacaccaatgtgggccttcatgccaaagtgccactgattgcctttcttggtctgatgcatctccggatcgcgttgctgctcattgttcttggtagagctgggtgcctcaatgatggtggcatccaccaaagtgccttgggtcatcatgacgcctgcttcggccagccagcgattgatggtcttgaacaattgacgggccagttgatgctgctcgagcaggtggcggaaattcatgatggtggtgcgatccggcagggcgctatccagggataatcgggcaaacaggcgcatggaggcgatttcgtacagggcatcttccatggcaccgtcgctcatgttgtaccaatgctgcatgcagtgaatacgcagcatggtctccagcggatagggccgtcggccattgcccgccttgggataaaacggctcgatgacagcggtcatattctgccatggcagaatctgctccatgcgggagaggaaaatctcttttcgggtctgacggcgcttagtgctgaattcactatcggcgaaggtgagttgatggctcatgatgtccctctgggatgcgctccggatgaatatgatgatctcatatcaggaacttgttcgcaccttccttaacaagtcgctcgttatatattaagcgagaaaataccttattgccaaatgccgtcctgaacagccattttttccaaaaaggtatggttgtatttggaaaaaattcccttacgactctgtcaaagatagcgtccatattaaaatcctttttatagaactcatcttaaacgactatactagcgttctttcagtcggacaataccgcataaaacttaaaaaggccaaaacaaaacaattagatataattaatacaacagtattctcaccataaatacaatcaccaaagttttaataaatttatagtaatcaatgcaaaaaaaacatacataatgcttaaaggtaataccctatctcatttctggtggttatacttcctacaactcacagaatagcttttctggcggtatatgcatttgtacaaaggcatccgaattccatgcccgtatctaatatcagaaaatattaactacggatttccataatatataaccccacctacagcccctggcgaaaataactttgcggctatatccgttaaaacaatcgtccttgaagtatttcatcactattcctgttaagtcaccgcccgcacggctataatccttgcattcattattacgaaaacaggaacgtctatgatccgcagtatgaccgcctatgcctgccgtgaaatcaagggtgactggggtagcgccgcatgggagctgcgctcggtaaaccagcgctatctggaaacgtacttccgcctgccggagcagttccgtagtctggagcccgtggtacgcgagcgcattcgcgcccgcctgactcgcggtaaagtcgaatgcaccttgcgttttgaacaagatcccagcgctcagggtgaactcatcctcaacgaaaagctggctaaacagctggtaaacgctgccaactgggtgaaaatgcagagcgatgaaggggaaatcaacccggttgatatcctgcgctggccgggcgtgatggccgccaaagagcaggatctcgacgccatcgccgccgacattctggccgctcttgacggcgcgctggacgacttcatcgtcgcccgcgaaacggaaggccaggccctgaaagcgcttatcgagcagcggcttgaaggcgtgagcggcgaagtggcgaaagttcgcgctcatatgccggaaattctccagtggcagcgcgagcgcctggtcgccaagctggaagatgcggaagtacagctggaaaataaccgccttgagcaagagctggtgctgatggcgcagcgtatcgacgttgccgaagaactggaccgtctcgaagcgcacgttaaagagacctataacattctgaagaagaaagaagctgtgggtcgccgtctcgactttatgatgcaggagttcaaccgtgaatcgaacaccctggcgtcaaaatcgattaacgccgaggtgaccaactccgcgattgagctgaaggtactcatcgagcaaatgcgcgagcaaatccagaatatcgagtaacgctttctcgtttgttaatgtatttcggtatccagggccatgataaatcatggcctttttatttatctctctcacgggcgaatgataagaatctacttataaaaaatagtcgtccagttttcggttgtggcaaataagcacaacgcggcacagtcaggaaaacactaccgcgagagaaaagaatggactttaatgcacttcaccagcaaaaccaacctttgttgcttgccaatgtctgggatgccagcagcgctcaggctgctcagcaggctggttatcaggcgctgggatcctccagcgctgctatcgccgcaatgttagggtatgaagatggcgaagagatgagttttgacgagctgttttatgtcgtctcacgcatcaaaaccgttagcgaactgccgttaagcgtcgatttagaggcgggctacggcgcgacaaccagccacatcattgacaatatccggcgtctagcgcatctcggcgtgagtggaataaatctcgaggatagtcatgtggtggatggtacgcgtcgtcttgacgatgcggagcgctttgccgtcaaactgcaggaaataacccgcgcctgtcccggtctgtttgttaatgtccgcaccgatacctttcttctcaacgtacaagatgcgctggttcaaacgctctatcgcggtcaactctacgccaaacacggcgcatgcggtttttttgtgccttgcgtcacccgcgcggaggatattaccgccatcgttcaccacgtgcctttacccttaaacgtaatgtgtatgcctgagctggctgacttcagcaccttatcgacactgggcgtaaaacgaatttcgatgggcaattttatttatgctgcgacgcaggccagactgaaagacttattatgtcaggtgcaaacccaacactctttctcaggtgttttttgaccatgaaaattaccgacagcatgcagtgcgatatctggtatcaggcgctgcttgaacgcgcggtggaattcaccggcgtttttttcgtcggcgtgaaaaccaccggcgtattttgtatctcggtctgtcgggcgcgaaaaccccggcgggaaaacgtcgaattttataatgactttaaatccgcgctggatgccggcttccggccatgcaaagtctgtcgcccgacggagaatgcccggacggcccccgcctttgttgaacaagcgctccgcctgctgcgagaagctccaaaggtccgcctcagcgatagcgagctacgtcagcacgatattagcccggaacgcgttcgccgctggttcctgcaaaaccacgggatcacctttcaggcttttcaacggatgcagcgtttgaatatggcgcttcaggaattaaaagcaggccgctcaactaccgatgtcgctttcgatagcggttacgagtccttaagcggcttcggctatacctgcaaaaaattgaccggtttcgcacccagcgcgcaacgccaggttgttttaattcatcgttttaccaccccgttagggccaatgtttgtttgtgcaacgcaacggggaatttgtctgctggagtttgtcgacagacgagcgctggagtcagaattcagcgacctgcagcggcggttcaacgccagcatcatcgcaggtgaaaatgcccacaccaggcaggcgcaacaggaaataacggagtatttcgccggacagcgtcaatcgttcgaggtggcgcttgataccccaggcagcgaattccagcgagcggtctggcgccgtttacagcacgttagcttcggtgagacgacgcattatcaatcgattgcgatggagataggtaaaccaacggccacgcgcgcggtggctgctgcaaacggcgctaaccgcgtcgcgattatcatcccgtgccatcgaattatcggcaaagatggttcgatgaccggttacggcggcggcattgcacgaaaaatatggcttattaaccatgaggcaaccatcagggaaaaacgcggctgattttactttcaggatcaacgggcccctccctgactttcaccgcggctcggtaagcctattttttatccagcacccggcaggttaaaaacgcccctgccgcgcacagcagcgccggagccagatagctgtgatccatgtgggtaaactccatcaccagcgccactgcggtcaacggcatctgcatggaggcggcgagaaacgcggccgcccccaccacagcgaagctgcttttatcaccgccagggaagccgagctgccagagcgcgcagagcagcaggctgaccaatccgcccaccgccagccctggggttaacaatccaccctccgcgccgccgcgcagcaccgccagaatcaccaccatcttcaatactaacaggacagcgaccatggagagaggcagcccgtcgctgagcgccagctgcattggacccttgccattgcccggaagctcggggaaataaagactcaggatggcaagaagagaaaaccccagcagacagaacaccggcatctgccagttacttcgcgcgcgtgaacgcgccgcgctggtcgctttgcgaaagagccaggcgccggtgccaagaatcgggcccgccagaatcgcccaccagagaaaggtgtgcggaagtgcgctggaaacaaaatggtattgcgattcatcccctaaccccagggtggccgtccaggcggcaatcgccgaggtcatcatcgccgccagcgttttttcccagctaaacgacagcagcatgacctcaaggctgaacaacgccccggccagcgggacgttatagaccgccgccagacccgcgcccgccccacaggcaatcagcgtgcgggtttcatcttccagcaggcgcagcttacgcgccaccatccccgcccccagcgcgcccatttcccggggcgccacttcgcggccaagcggggagcccagcgctactgtgacgatctgcagcagcgcgtggatcgtcgtggtgcccgcgggcatgggtacgcaggggttggccaccgccgccgcaatggaaacccgcctctgcccatagcgaccaagcagccaccagccaaatccggcgacggcgccgccggccacgattgccacgatgcggcgtggccaggacgactccgtgacgccctgtaaaaatgacaccgaaccgacgatctgcccgtaactgtaaccaaaagccaggtgctgaatcgcgtgtaaaattagtgccaaaaccatgccggacagaccggccagaatcccggttaataccacggctatcaggcggatcagatgatttttattcccggcggcgacgctcattttctcaggccttgaaaaggaaaaataaaagaataaaggacgagacttaaacattgcgtaatcatagtgttttcgatagtgatacccatcgcttcacttagcattactttttctaatcaataaaaatccctaaaaatcaataaacctttaaatcaagccatcacagatactacttccattaatttttcctggcgtaaatgattcgctttagaaaatctcaatcgtgatcctgcgcacaaatcgttaacctgcccgccattacctggggggatctatgctgcttcatgttctgtatttaatcggtatcaccgcggaagccatgaccggcgcactggctgccgggcgccggcggatggatacgtttggcgtcattattatcgccacagcgaccgcgctgggcgggggttccgttcgcgatatcctgctggggcactatcctcttggttgggtgaagcatcccgaatatgtcatcattgtcgccgtcgccgccgttctcacgaccattgccgctccggtgatgccgcaccttcgtcggctgtttctggtgctggacgcgctggggctaatcgtgttttccatcatcggcgcgcagatcgccctggacatgggcgaaggcccggttatcgcctctattgccgccgtgatcaccggtgtcttcggcggcgtactgcgcgatatgttctgcaaacgcattccgctggtcttccagaaagagctgtatgccgggatctcctttgccgcagccgtactctatattgctctgcaacattacgtcagcagccacgatgtggtggtgctggctacactgctgttcggctttaccgcccgcatgctggcgctacgctggaaactggggctaccggtcttccactacacccatgacgcccactaaccgccttaaaatccggggatgcgctgcccgctaagccattgcgccagcgccaccacgtccggatggtgcaggaaagccaccagctggcgggctctgatctcccccacgcccggcagcgtgcgccattgcgcttcactttttgccgccagcaaatgccagttctcgctttcgagctgcgccagcgccccctgcggcaccgggatccccatcgccagcacccagcggataaaaggtcgtttgcgaacaagatcaaactgatgccagaggtgctgcccgcgggcggcggaaatccctggcaccgcctgcagctgctcaacggtaagcgccagccaggaaaagatatgcgtcatcgggttttgctgctgaatgacgcgccataaattttcccccacgccatcgacattcagggcggactttgatgacaaccagatcagcctggaaagaaactgttcgctgcactcaggggtggcgaaatagcaggttagcgcattaaatttcgccggcggcggcgtcggtttatggcgctcggccgtccgccagacgacggcgtcgacccgaggaataccctgccctgccagactgatctgcagctgatcgccaaccccaatatccagcatctgccagcgggacacagagccaacgttaacccgctgcacgcgtttatcatccagccgctggggctcaagctcggccaccacgttgagtctgccgctgcggccggtactgaaacggatcgcccgtacctgcatcacccgcgatgccggaggatatttccaggcagccagccactcgccctttccgggcgaccagactcgccctggcggctcgcgtccttcgcgcacaatcacaccgtcgctgacgaagggcagcggcgagcgataccagcgctggcgccactgcgccacctgctcgatgctcgacaccgggtgggtatattgcccgctgtacttaaaccccgcctgcgtcagcagctgctgtcgacggcgcatatccgacgggccgtctggccaggcccagataaaaacgtccagttgactgagcgccgccgccgcgtcggctcgcatcatcaacccggcgactttcgcccgcgcgttcatccccccagcctgctgctgaacatggccgccccggcgcagaaacagctccccctgcagtacgctgtcggccagttcaccggtcatcactttctccagcgctgggatctgccgggctcgggcggtccatgcctcaccgcgcagaccatcgccgcggctaatggcctgaaccagacgcccctggcgataaacgagagtcaccgccacgccgtccactttaggctgtatccacaggtcggatttatttttcatccagcgggcaacgctgtcctcatccgccagcttgcgcacgccggtatgggccaccggatgacgcgcatcgccggtgggcggaggcagatcgtcatcctcaggcgtcgcgcccggaaagcattgtcgccactgcgccaggcgcagggtgagctggtcgtaaacgtcatcgctcactccgctggcgccctgccgccagtaagcctctttccaggcgacaatttgctgatgaaggcgtgatgtctcctgccttcctctggccggcggccagtccggacacgtcgccagcgcgctggcagagaacatccctaacgccagccaccaccctcctttacgcattgcagtcccctcctccatcacctggcggagagtctgctgcagaatgccgcgagccgcgacggaagctttttcgccttgcgaagcgccttccaggatttacgcctctttgcggcaacggctggcgaattcaggaaaacggcaggcaaaatgaaagaaacagcggcaaaaagtgtgacaatgactgcgtcacgccgcggcgacgtgtataataggctcgtatgtaggacctctttcgataaccacatacaaaagacactcatggctcaaggcacgctttatattgtttccgcccctagcggcgcgggtaaatccagcctgattcaggctttattaaaaacccaaccgttgtatgacacccaggtatcggtctcccataccacgcgggcgccgcgtccgggtgaagtgcacggcgaacactatttcttcgtgaatcacgacgaattccgctcgatgattggcgaaaacgcgtttctggaacatgcagaggtctttggcaactattacggcacgtcgcgtaaagcgatcgagcaggtgctggcgaccggcgtcgatgtcttcctcgatatcgactggcaaggcgcgcagcagatccgtaaaagcatgcccggcgcgcgcagtatttttattctgccgccgtcaaaagatgaactggaccgtcgcctgcgcggccgcggccaggacagcgaagaggtgatcgcgaaacggatggcccaggccgttgcggaaatgagccattacgcggaatatgattacctgattgtgaacgatgattttgacaccgccctgagcgacctgaaaaatatcatccgcgctgaacgtctgcgcatgagccgccaaaagcagcgacatggcgctttaatcaccaaactattggcagactgaacccacattcagtatcatgcccagtcatttcttcacctgtggagcattttaagtatggcacgcgtaactgttcaggacgctgtagagaaaattggtaaccgttttgacctggtactggtcgccgcgcgtcgcgctcgtcagatgcaggttggcggaaaggatccgctggtaccggaagaaaacgataaaaccaccgttatcgcactgcgcgaaatcgaagaaggtctgatcaacaaccagatcctcgacgtacgtgagcgccaggaacagcaagagcaggaagccgctgaattacaagccgttaccgcgattgctgaaggtcgtcgttaatcacacagcgggtcgcccttgtatctgtttgaaagcctgaatcagctgattcaaaactacctgccggaagaccagattaagcgtctgcggcaggcgtatctcgttgcacgtgacgctcacgagggtcagacacgttcaagcggtgaaccctatatcacgcacccggtcgcggtagcctgcattctggccgagatgaagctcgactatgaaacgctgatggccgcgctgctgcatgatgtgattgaagatacccccgccacctaccaggacatggaacagctttttggtaaaagcgtcgccgagctggtagagggggtgtcgaaacttgataagctcaagttccgcgataagaaagaggcgcaggccgaaaactttcgcaaaatgatcatggcgatggtgcaggacatccgcgtcatcctcatcaagcttgccgaccgcacccacaacatgcgtactctgggctcgctgcgcccggataaacgccgccgcatcgcccgcgaaaccctggaaatttacagcccgctggcgcaccgtttaggcatccatcacatcaaaaccgagctcgaagagctgggctttgaagcactgtaccctaatcgctaccgcgtcattaaagaggtggtcaaagcggcgcgcggcaaccgtaaggagatgattcaaaagatcctctccgaaatcgaagggcgtttgcaggaagcagggatcccctgccgcgtcagcggtcgcgagaagcatctatactccatctactgtaaaatggtgctcaaagagcaacgttttcactcgatcatggatatctacgccttccgcgttatcgtccatgatgccgatatctgctatcgcgtgctcggccagatgcacagcctctacaaaccgcgtccgggtcgttttaaagactacatcgccattccgaaagctaacggctatcagtctttgcacacctcgatgatcggcccccacggcgtcccggtcgaggtacaaattcgtaccgaagacatggaccagatggcggagatgggggtagcggcgcactgggcttataaagagcacggcggcgaaagcagcaccaccgcgcaaatccgcgctcagcgctggatgcaaagcctgctggagctgcagcagagcgccggtagctcgtttgaatttatcgagagcgtaaaatccgatctgttccccgatgagatttacgttttcaccccggaagggcgcattgtcgaactgcctgccggcgccacgccggtggacttcgcctacgcggtgcataccgatatcggtcatgcctgcgtcggcgcgcgcgtcgaccgtcagccctatccgctgtcgcagccgctctccagcggtcagactgtcgaaattatcaccgcgccgggcgctcgcccgaacgccgcctggctgaactttgtcgtcagctcgaaagcgcgcgccaagatccgtcagctgctgaaaaaccttaagcgcgacgattcggtcagccttggccgtcgtctgctcaatcacgcgctgggcggaagccgcaaactcgccgagatcccaccggagaatatccagcgcgaactcgatcgcatgaagctggcctcgcttgacgatctgctggcggaaatcggtctgggcaacgcgatgagcgtcgtggtggcaaaaaacctgcagcagggcgaagccgctgcggcgccggtgccggctaacgcgtcgaaccacggtcatctgccaatcaaaggcgccgatggcgtgttgatcaccttcgccaagtgctgtcgcccgatcccaggtgacccgattatcgcccacgtcagtccgggtaaagggttggttatccaccatgaatcctgtcgtaacattcgcggctaccagaaagagccggagaaatttatggcggttgagtgggataaagagaccgctcaggagttcatcaccgaaatcaaggtggacatgtttaaccaccagggcgcgctggctaacctgacggcggcgatcaacaccgcgtcttccaatatccagagcctgaatacggaagagaaagatggccgcgtatacagcgcctttatccgcctgaccgcgcgcgaccgcgtgcatctggcgaatatcatgcgcaaaatccgcatcatgccggacgtgattaaagtcacccgtaaccgaaactagctttatgaactcaaagcgctacgagcgtatctgcgagatgctcgccaggcgtcagcctgacctgacggtctgcatggagcaggtccataagcctcataacgtctctgcggtcatccggaccgcagatgccgttggcgtacacgaagtgcatgccgtctggccgagcagccggatgcgtaccatggcctccgccgccgcgggcagcaacagctgggtgcaggttaaaacccaccgcactatcgcagatgccgtcagccacctgaaaggccagggcatgcaaattctcgccactcacctttccgacaaagccatcgattttcgtgaaatcgactatacgcgtccaacctgcatcctgatgggccaggagaaaaccggcatcacccaggaagcgctggcgctggccgatcaggacatcattatcccgatgatcggcatggtgcagtcgctgaacgtctccgtcgcctcggcgctgatcctctacgaggcgcagcgccagcggcagaatgccgggatgtaccaacgcgccaacagcatgctgccgccacaagagcagcagcgcctgctgttcgaaggcggctatccggtgctggcccgcgtcgccagacaaaaaggtctgccttacccccacgttaacgagcagggcgaagtggaagccgatgccgcgtggtgggccaccatgcaggctgcgaggtaaacccaatgtcaggccgcctgttagatgccgttccgctcagttcactcaccggtgtgggcgctgcgcagagcagcaaactggcgaagattggcctgcatacggtacaggatctgctgctgcacctgcctttacgctacgaagatcgcacccatctttacccgatagccgagctgcttcccggagtttatgccaccgtggaaggtgaagtgctcaacagcaatatcaccttcggcggccggcggatgatgacctgccagatcagcgatggcaccggcatcctcaccatgcgctttttcaacttcaacgcggcgatgaaaaacagcctcgcgaccggtcgtcgggtgctggcctacggtgaagccaaacgcgggaagtacggcgccgagatgatccacccggaatatcgcgtccagggcgatatgagcaccccggagctgcaggaaacgttaaccccagtctatccgaccaccgaaggcatcaagcaggcgaccctgcgcaagctcaccgatcaggcgcttgagctcctggaaacctgcgcgattagcgaactcctgccgccggagctggcgcaggggatgatgagcctgccggaggcgctgcgtacgctgcaccgcccgcctccctccttgcaacttagcgagctggaaagcggcaagcacccggcgcagcagcgtctgattctggaagagctgctggcgcataacctcagcatgctggcgctgcgggcaggcgcccagcgctatcacgccctgccgctcggcgccaacgataccctgaaaaaccaactgctggcctccctgccctttaagcccaccggcgcgcaggcgcgggttaccgccgagattgaacacgatatggcgctggacgtgccgatgatgcgcctggtgcagggcgacgttggctccggtaaaacgctggtcgctgccctggccgccttgcgcgctatcgtccacggcaaacaggtggcgctgatggcgcccaccgaactgcttgccgagcagcatgccaataacttccgcaactggttcgaaccgctgggtattgaagtcggctggctggcgggcaaacagaaaggcaaagcccgccaggcgcagcaggaggctatcgccagcggcgaggtgcagatgattgtcggcacccacgccatcttccaggagcaggtgcagtttaacggcctggcgctggtgattattgacgaacagcaccgcttcggcgtgcatcagcggctggcgctgtgggagaaaggtcagcagcagggattccacccgcatcagctgatcatgaccgccacgccgatcccccgcaccctggcgatgaccgcctacgccgatctggacacctcgattatcgacgagctgccgccaggccgaactccggtgaccaccgtcgccatccccgacacccggcgcagcgatattatcgaccgcgtgcgcaacgcctgtacccatgaaggtcgccaggcctattgggtctgtacgctgattgaagagtccgatctgctggaagcccaggcggcggaagccacctgggaagagctcaaactggcgctgccggagctcaatatcggcctcgtccacgggcggatgaaaccggcggagaagcaggcggtgatgcaggccttcaagcagggcgagatgcatctgctggtagccaccacggtgattgaagtcggtgtcgacgtgcctaactcaagcctgatgattatcgaaaacccggaacgtctgggtctggcgcagctgcaccagctcagagggcgcgtcgggcgcggcgcggtcgcttcccactgcgtgctactctataaatcgccgctctccaaaacggcgcagaaacgtctgcaggtcctgcgcgacagcaacgatggtttcgtcattgcccagaaagacctcgaaattcgcggtcccggcgagctgctcggcacccgccagaccggcaacgccgaatttaaagtggcggacttactgcgcgatcaggcgatgatccccgatgtccagcgcattgctcgccacattcatgaacgctatccgctgcaggcccaggcgcttatcgagcgctggatgccggaaaccgaacgctattccaacgcgtagcgcgcttttgccgcgctgcgggcaacttttctacacaacgagtggattatgaaacgagaactggccatcgaattttcgcgtgtcaccgaagccgccgcgctggcgggctataaatggctgggccgcggcgataagaataccgccgacggcgcagcggttaacgccatgcgcattatgcttaacctcgtcaatatcgacggcaccatcgtcatcggcgagggcgaaatcgatgaagcgccgatgctttatatcggcgaaaaagtgggtaccggcaagggcgatgcggtagatatcgccgtcgatcccatcgaaggcacccgcatgacggcgatgggccaggccaacgccctggcggtgatggcggtcggcgataagggctgcttcctcaacgcgccggatatgtatatggaaaagctgatcgtcggcccgggcgctaaaggcgctatcgatctcaatctgccgctggaagagaacctgcacaatatcgcccgcgccctgaacaagccgctgggcgagctgaccgtcaccgtgctggcgaaaccgcgccacgacgcggtcattgcccagctgcagcagctgggcgtgcgcgtgttcgctattcccgatggcgacgtcgcggcctctattctcacctgcatgccggatagcgaagtcgacgtactgtacggcatcggcggcgcgccggaaggggtggtttccgccgcggtgatccgcgccctcgacggggatatgcaggggcgcctgctggctcgccaccacgtgaagggcgataacgaagagaaccgccgcatcggtgaaaatgagctggcgcgctgcaaaaccatgggcattgaagcgggcaaagtgctgcgtctggatgaaatggcgcgcagcgataacgtcgtcttctccgccaccgggatcaccaaaggcgatctgctggacggcatcacccgcaagggcaacatggccaccaccgagacgctgctgatccgcggcaagtcgcgcactatccgtcgtatccagtcgattcattacctcgaccgtaaagatccagacatccagcagcacatcctgtaataccgctttttctctcccaggcaaccgtccgcaggcggttgccctgttcttcgtttatatttgatcaatagagctttcttgcgccttcggggtggaaatctggctcgtctggaccgaagataaggcatcgcttggcaacaggagaagacgatggcggactgggttagcggcaaagtgacaaaagtggagtactggacggacgccttgttcagtttatacgtgcgggcgcctgttcatccgtttaccgccgggcaatttaccaagctcgggctggaaatcgacggcgaacgcgtgcagcgcgcctactcctacgtcaacgcccccggcaatcccgacctcgagttctatttggtcaccgtcccggaaggcaagctgagcccgcgtctggcgtcgctgaagccgggcgatgaagtcctggtggtgagtgaagcggcaggtttcttcgtcctcgaggaggtaccggattgcgataccctgtggatgctggcgaccggcactgcgctggggccgtacctgtcaattttgcaggaaggcaaggaccttgagcgctttaataacctggtgctggtccacgccgtccgctacgccgcggacctgagctatctgccgctaatgcgcgaactggagcagcgctatgccggcaaactccgtattcagacggtggtcagccgcgaaaccgtggaaggctcgctgaccggccgggtgccgtttctgattgaaaccggcgcgctggaagaggccgtcggcctgccgatgaccaccgacaccagccatgtgatgctgtgcggcaacccgcaaatggtgcgcgatacccaacagctgttaaaagagacccggcagatgaccaaacatctgcgtcgccggccgggccatatgacggcggagcactactggtaatcaggcgtccgctttccagcgcacgtcctgggtctccttgccgaacttattctcgccctgggtgccgacaaacgcccccaggtcgatcagcatcatgacgataatcagcgttggcacaaagcgcccgacgccccactgccagacctgcggcaacatcgcccagttccccgccagcagcatccacgccagaaccatcagcagcgcccacagcccggatttgccgcgatcgtgcagtcgcttgaccaccaccgccgccgtcggccacagcaggcagacgataataaacgccgccgtctgcaggttgagcagattgctgcctgccagggtaaacaaggcgctcatggtcaccagccagatggcaatccagatccagaaatcgcggcggccaatgcgccctttaattgagaataaccactgctgtagggtcatgcgtttttccttatcatcatcgtctgcgtagtttaccctggcgtcgtgactttttgacaagcgccgcgcttcccgatttaatcgtcagcaggcaaaaaaaggaacgacgggcatgaagaagtggacaattttgtggttaagtgggctgatgggccttgccgtcggcccgcacgcgttgtccgcagagagcgaatcgacgaccgcggcagcgccctacctgctcgccggcgcgccgagctttgaccagtcgatcagtcagttccgcgagaaattcaacgccgataacccaaagctgcctctgaacgaattccgttccatcgccaccagtcgcgatcgggctaacctgacccgcgccgccagcaaaattaacgaaaatctctatgcctccaccgcgctggagcgcggcacgctgaagatcaaatccatgcagatcacctggctgccgatccaggggccggagcaaaaggcggccaggaccaaagcgctggagtatatgagcgccatgatccgcgccttcgtgccgacttttagccaggcgcaaagccagcaaaaactgcagaaactgctggccgccggcaagggcaagcgctacttcgccgataccgaaggcgccgtgcgctatgtggtggcagatcatggggaaaagggcctgaccttcgccattgaaccgattaagctggcgctatctgaaacgctggaaggtaacaataaatgacaaaaagcaaagcctttccagtgacgagtctctatactgtttcacagaccatgctgccctctggggcggctatattccttaattcgcttaagtagcgtggagaattaaaatgcgacatcctttagtgatgggtaactggaaactgaacggcagccgccacatggtaaacgaactggttgcgaacctgcgtaccgagctggctggcgtaagcggctgtgcagttgccatcgccccgccggaaatgtatctggacctggctaagcgcgcggcagaaggcagccacattcacctgggcgcgcagaacgttgacgtgaacctgtccggcgcattcaccggtgaaacctccgccgaaatgctgaaagatatcggcgcgcagtacatcatcatcggccactccgagcgtcgtacctaccacaaagaatccgacgagctgatcgcgaagaaattcgccgtgctgaaagagcagggtctgaccccggttctgtgcatcggtgaaaccgaagccgaaaacgaagcgggcaaaacggaagaagtttgcgcacgtcagatcgacgccgtgctgaaaacccagggcgctgccgctttcgaaggcgtggttatcgcttacgaaccagtatgggctatcggtaccggcaaatcagcgaccccggctcaggcgcaggcggtgcacaaattcatccgtgaccacattgctaaagctgacgccaaaatcgctgagcaagtgatcatccagtacggcggttccgttaacgctggcaacgccgcagagctgttcacccagccggacatcgacggcgcgctggttggcggcgcctccctgaaagctgacgctttcgcggtgatcgttaaagcagcagaagcagcgaaaaaagcgtaattcgcttttcccggtggcgacacgcgaccgggttgactgacaaaacgtgggagcccggcctagcacagcgcaagccgggctttcttttgccgttacagtttccccaacagctgataccaggcgtagtccagcggcagtaaaatcagataactcaccgccgccagcgccagacacagttgcatccccgccctcgccgggaccttgcctaaccccatcgccaccacgatcggcgacgcctgatagggcagcagcggcgtggaatagcccagcacctgaatcataatcacgcttagcagcggaaaaccggtggcgtcggcaaagctctgggcaaaggtggtatacagcgccggcacgccgttggcggtcataataaagttcagcgcgctggttatcccggtcagggcgagaaagctggtgaaaggattgtctttatccaggggcatcacctgcagcagcgcattgcccactgcgccgccaatcccggtttgggtgacggcgatcgctagccccagaatcccggcgacgtaaatgcaggtgcgcatattcaccccgctggcaaactcctcgccgttgataaagcccacccgcggcagcagcgtgatcacagccgccgccaggccggtccacgccgggccgacgccgtgccagctctcggtcacccatagcgagaggaccaccgccagcagccacgccagacgtttctcgtcgcggctcatcggcggcagcggcgccaggtcgcgcggtggatgcggcttgccgggaaaaagccagcaaatcagcgccaccagcaccgcccctttcagccagccaagcaccggcgtatgcagcagtaaatagggaacataattcagatggataccgtacgagccttccgccgcgccactcatcaccagattcggcacgttggcgggcaaaatcgtcgctgacagctgaaaggtgccgaaccccaccgccagcgccaggccgaaccagccgcggctgccgtcggcaatgcccgcgcggcgggccatcgccgccacgatcggcatcagcagcgcgatgcgccccatgttggagggcatcacgaacgccagggcgtagctcaggagtaccacgctggcgaccatccgcggccaggagtcggtgagcctggccgacagcgcctgcgccgcccggtccgccagtccggttttacggatggcgatgccgagcacaaagccgctgaacaccagccagaacgccgaagaggcaaagccgccgaagatcacctccggcggagcgattttcgccatcattgccgctgcgaagaacagcagcgcggtgataaattccggcagcagcgacgtcgcccagagcacgatggtgacgccgacaatcaatgaaggaaggaacagcgggtgggtaagccagagcgacatgcctgtctcctgtcgtttttttcagcaagaatacgacgacaggtaagacaggtaaacgccagaactagtggtttgcgttaaggatggcgcagcgatgatcctgaatttcttccgctgaagcccggttcagggtcagcaggttacgctccgtcgccagcagcaccagcgagccgtcgctctgttgcgccattgccagcgcgaagcgtcccatatgctggcgcgcctccggcacctcttccgccagcatcaggaacgggctacgctgggccagctccgcctccgtcacccggcgcgccaggtattcgtggccctgaagcccgcccggtaacggcagccagcggctgctgatcgctgcggcatccttatctaactgcacgcgcacatcggggcgcaggcaggagatatgaatatggaaatggttttgcgtacgtccactgcgcgagttgatcgccagcgataccgcgttatcaggaaccggcgcgccgtggcgctggctcatgatttcacgcccctgccaggcctgccagaaaaagttcggcgtcaacggatccagcagcagcgggctttcggtgccgttgatgcggtaggtcggcatcagcaaatactgcagcgggccgttacggtctttaaacagcacatagccgcccttgaggttcacttccgcgcacggcgacgggttttgctgctgttgctgatggggtacgcactgctgcaggacaatcttgcgtaatgcgtccgggttgccagagtgcagccagtagtagccgcccgccagcgccgcgaggatcgccaccagcagcgccagcaaaaagtatcttactcttctcattttcattccctgttaagcctgaagcggaagagtagcgtaatttgatgactaaatgaaaacagatggtggacggggcgttgtcccgggtggcggctgacgccttacccgggctacgcaccgcgcaaaactatagccctgctaagcgtagcgcaagcagggacaagagaattaacgctggctaatctggtcgaaggtgccgccgttggagaagtgctctttctgcgctttcgtccagccgccgaactcctgatcgatggtaaacagcttcagtttcgggaattcgttagcatatttcttcgccacattcggatcgcgcgggcggtagaagttcttcgccgcaatctcctggccttccggcgagtagagatacttcaggtacgcttccgccacctggcgcgtgcctttcttatccaccactttgtcgaccaccgagacggtcggctcagccagaatcgactcacttggggtcacgatttcaaacttgtctttgcccagttcgttggtcgccagcagcgcttcgttttcccaggcgatcagtacgtcgccgatgccgcgttctacgaaggtattggtcgaaccgcgcgcgccggagtccagcacttccacgtttttatacagcgccttgacgaattcctgggctttcgcctggtcgccgtgattctgatgcagggcatagccccaggccgccaggtagttccagcgggcgccgccggagcttttcgggttcggggtaatgaccgacacgcccggtttgatcagatcgttccagtcatggatctgtttcggattgcccttgcggacgaggaacacgatggtggaggtatacggcgcagagttatccggcaggcgtttcagccagtttttatcgatgcggccgcgttcggcaatagcgtcgacatcgtaggccagcgccagcgtgaccacatccgcttcaataccgttaatcaccgaggtcgcctgtttgccagagccaccatgcgactggcggatcaccacgttgtcgccggtctcctgcttccagtgtgcgctaaacgctttgttgtactgttcgtacagctcgcgcgttggatcataagatacgtttaatagctgaatgtcttttgccagaacgctggcggatgccagcaacagagttaaccctacgccccacttattcatcgcaccgctctctttatgtgtgttgtgatgggttaagcgtgccagaaagcgattcaatgattaaagaataaaaaaagattggctataacttgcggatataaagacgcgagtaaggatgaccccctcccgggcgggagagggcgcgaagcgattagacttcttccatgcgacccagcagcgcctgcagacgttcctgccagccctgctgctgctctttcagctggctgttttcgcgctccagctcttcacgaccatgctgcgcgctctgaacttcctgcaccagggtgttgttcttttctttcagctcttcgatttccatctgcaacagagtgatggtatcaatcgcctgctgaaccttagattctaatttctcaaacacttctaatgacatcgtcatacctctcctgaacttgcaaggcgttgatagaaactcgtgtttcgtatacgcggtcccgccttaacgaaaattagcgcacatagcggtgttatcgtcgattgtatgaatccccgccgcccctgtccagcggcaagccgcgtagattgcggtttgcaacacttttcagtctttacctggtgctttcagcgcagttcgctcgtagttcatgggtcaatgttaattttatggttaacaaaatgcgtggtgaaacgctccggcagcgctctcgatgcgcgcaaatggcgcgaaaacgctcattttcttgacgaggtacacacatttgaagttcgatatttctcgtttttgctcgttaacgataaattaacactatgcctacatggcaatatggtcgtctgtgaccaccctacatacaataatcatcaccacgcttcaggattcgattatgagccaaacatcaaccttaaaaggccagtgcatcgcagagttcctcggtaccgggttgttgatctttttcggcgttgggtgcgtggctgcgctcaaggtcgcgggagccagcttcggacaatgggaaatcagcatcatctggggtctgggcgtcgccatggcgatctacctgaccgccggggtctccggtgcgcaccttaacccagcggtgactatcgcgctgtggctgttcgcctgcttcgaaggccgcaaagtggttccttttattatttcgcaattcgctggcgccttttgcgctgcggcattagtttacgggctttactacaatcttttcctcgattatgaaaccacccaccatatgattcgcggcagcgtggaaagcctcgatctggccggcattttctccacttacccgaacccgcacatcaattttgtgcaggccttcgcggtagagatggtgattaccgctatcctgatgggcgtcatcctggcgctgaccgacgatggcaacggcataccgcgcggcccgctggcccctctgctgattggcctgctgattgcggtgattggcgcctccatgggaccgctgaccggcttcgccatgaacccggcgcgtgacatcggcccgaaagccttcgcctggctggcggggtggggtgacgtcgccttcaccggcggcaaagatattccttatttcctggtgccgctgtgcgcaccggtggtcggcgcggcgctgggcgcattcagctatcgtaagctgattggccgtcacctgccttgcgacacctgcgtggaggaagagcaacagagcccctcctcttccaccgctcaacataaagcttcgctgtaatctgactacgggacaccgactatgaccgacaaaaaatatatcgttgcgcttgaccagggcactaccagctcccgggccgttgtgatggatcatgatgccaatatcgtcagcgtctcccagcgagaatttgaacaaatttatcctaagccaggctgggtcgaacacgacccgatggaaatctgggcttcccaaagctcgacgctggtcgaagcgctggccaaagcggatatcaactccgatcagatcgcggccatcggcatcaccaatcagcgtgagaccgtggtggtgtgggagcgagagaccggtaaacccatctacaacgctatcgtctggcagtgccgccgtaccgcggagatctgcgagcagctcaagcgtgacgggatggaagagtatatccgcaaggccacaggcctggtggtggacccgtacttctccggcaccaaggtgaaatggatcctcgaccatgtcgaaggttcccgtgagcgtgcgaagcgcggcgagctgctgttcggcaccgttgacacctggcttatctggaagatgacccagggccgcgtgcacgtcaccgactacaccaacgcctcgcgtaccatgctgttcaacattcacgacctcgactgggacgacaagatgctcgacgcgctggacattccgcgcgccatgctgccggaagtgcgcaagtcttccgaagtgtacggccagaccaacatcggtggtaaaggcgggacccgtattcctatcgccgggatcgccggtgaccagcaggcggccctgttcggccagctgtgcgtcaaagaagggatggcgaaaaacacctacggcaccggctgctttatgctgatgaataccggcgaaaaagcggtcacctccacccacggtctgctgaccaccatcgcctgcggcccgcgcggcgaggtgaactacgctctggaaggggcggtgtttatggccggcgcgtctattcagtggctgcgcgacgagatgaagctcatcagcgatgccttcgactccgagtacttcgccaccaaagtgaaggataccaacggcgtatacgtggtacccgcgttcaccggtcttggcgcaccgtactgggacccgtatgcccgcggcgcgattttcggcctcacccgcggcgtgaactccaaccacattatccgtgcgacgctggagtccatcgcctttcagacccgcgacgtgctggaagcgatgcaggctgactccggcattcgtctgcacgccctgcgcgtagacggcggcgcggtggctaacaacttcctgatgcagttccagtccgatatcctcggcacccgtgtcgagcgtccggaagtacgcgaagtgacggcgctgggcgcggcctatctggccggtctggcggtcggtttctggcagaatctggatgaactgcaggagaaagcggtgattgagcgcgaattccgcccggggattgaaactactgagcgtaactatcgttacagcggctggaagaaagcggtgaaacgcgcgttagcgtgggaagagcacgacgaagcgtaagattgtgaagttattcccggcttgcggcgtaaacgcctgagccgggctacaaaaccccaaacagcacgatcttgtagcccggacaggtgcgcagcaccgcttccgggttttttatcaaccaaacatcggcagcagcaggtacagcttaatcaccagcgcgttgacgatatcgataaagaacgcccccaccatcggcactaccaggaaggccatatgcgatggcccgaaacggtcggtaatcgcctgcatattggcgatcgccgtcggcgttgcccccaggccaaacccgcaatgcccggctgccagcaccgcggcatcgtagtttttgcccatcatccgataggtgacgaacaccgcatacagcgccatcgccagcgcctgcaccgccaggataataatcatcggcagcgccagcgaggccaactcccacagcttgaggctcatcagcgccatggcgaggaacagcgacaggctgacgttgcccaacaccgataccgcgcgatcgaacacccgatacaaccccgccagcgccaggctgttgctgaggatcacgccgataaacagcacgcagacgaaggtcggcagctcgaagacgctccccgccagcagttgcgcaaccaccttgcccagcgtcagacagatggcgatcagggcgatactttcgatcagcaccagcgaggtgatcacccgccccacgtccggcttttcaaaggcggttggcgccacctgatcgtccggtgtcccgtccggtgaggaagagtgcttcaccagataacgcgccaccgggccgccgatcaggccgcccagcaccaggccgaaagtcgcgcaggccatcgccacctcggtggcgttggcaaaaccgtagcgctcaacgaacagcttactccacgccgccccggtgccgtggccgccggataaggtaatcgacccggccagcagacccattagcggatccagccccagcagcgtcgccatgccgataccgagggcgttctgcagcagcagcaggccaaccaccacgatcaggaaagtgcccagcaccttgccgccggcccgcaggctggcgaggttggcgttaagaccgatggtggcgaagaacgccagcatcagcggatctttcagactcatatcgaaatcaatttcgatatccatgctttttttcagcgccagcagcgccagcgccaccagcagaccgccggcaacgggttcaggaatagtgtatttcttaaggaagggaacggtttgtacgagttttctgccgagtaacagcacgagcgttgcggcaacgagcgtcgataaggtatcgagatgaaacataaaaagctccttatgggcgcatgatccattcacacgcgacgatattcctggtgtctttagcttctcatcatgaggagtcagagggggattttacgcagaacggcggaaaaattgacagaaaaagatattttgtatcctgaatgatgcgatttagcatacaaaatgttaattatctcgttgcgcatattcacggtataaatttttatgagcaaacgctggcaaacgtttgcttttggtctacagtccgataaaattcccgctttgccaccttgggattgcttgtgatgtccgttaacaccgcagagtcagaaaatgcgcaaccggttgcgcataaaccagccagcgaattaatctaccgcctcgaagatcgcccgccgctaccgcaaaccctgttcgccgccttccagcacctgctggcgatgtttgtcgcggtgatcaccccggcgctgttaatctgccaggctctcggtctcccggcgcaagatacccaacatatcatcagcatgtcgctgttcgcctccggcgtcgcctctattattcagatcaaagcctggggcccggtcggctccggactgctctccatccagggcaccagcttcaactttgtcgccccgctgatcatgggcggtaccgccttgaaaaccggcggcgccgacgtccccaccatgatggccgccctcttcggcaccctgatgctggccagctgcaccgaaatggtcctctcccggatcctgcacctggcgcgccgtatcattaccccgctggtttccggcgtggtggtgatgattatcggcctgtcgctgattcaggtcggactgacctccatcggcggcggctacgcggcgatggctgaccacacctttggtgcgccgaaaaatctgctgctggcgggtatcgtgctggcgctgattattatcctcaaccgccagcgcaacccgtacctgcgcatcgcctcgctagtgattgccatggctgccggttatctggcggcgtggttcctcgatatgctgccagccaacaccgccccgaccaacagcagcctcatcaccgtcccgacgccgctctattatggcctcggcatcgactggagtctgctgctgcccctgatgctggtgtttatgatcacctccctggaaaccatcggcgatatcaccgccacctccgacgtctccgaacagccggtctcgggtccgctgtatatgaagcgcctgaaaggcggcgtgctggctaacggcctgaactccttcgtttccgcggtcttcaacaccttcccgaactcctgcttcggccagaacaacggcgtgatccaactgaccggggtcgccagccgctacgtcggctttgtggtcgccctgatgctgatcgtcctcggcctgttcccggcggtgagcggctttgtccagcatatccctgagccagtgctcggcggcgccacgctggtgatgttcggcaccatcgccgcgtccggcgtgcgcatcgtctcccgtgaaccgctgaaccgtcgagcgatcctgattatcgctctgtcgctggcggtaggcctcggcgtgtcgcagcagccgctgatcctgcagttcgccccggactggctgaaaaacctgctttcctccgggattgccgccggcggtatcacggcgattgttctgaatttaattttcccgccagaaaaggcgtgatctcatgcgttcccggtcgcgcatcggccgggacgtcctccaaccacctgccccatcacggaaataaaccacgcctgccttgagaagtgcgcctaaatcgggcataacacggtgatgtgcatctcacagaatggaagaccatgaaatttcttggaaagctgattctctggctgctagtcgctctgctgctcgtcattattggcgcgtggttcctgctgcaaacccactggggcgcccgccaggccagcgcctggctcagcaatggcaccggctggcaggtctccttcgatgagatggagcacgatttctcctccccccatcatgtgcagttgcgaaacgtcacctttggtcgggaaggcaagcctgccactttggtggcaaaaacggtcgacattggcttcagcacccgccagtttagcgatccgctgcatgcggatgagatagtccttaacgacggcactctgaatctgtcaccccactctgcagacctgccgttcgctgccgaccggctgatgttgcgcaatatggctttcaacagcccggaaaccggctgggcgctcagcgcgcagcgcgtcaccggcggcgtcagcccatggacgccggaggcgggcaatgtgctggggaaaacggcgcagatccagatgagcgcgggctcgatgacgctcaatggcgtcgaagccagcaacgttctgattcagggtaagattgatcagggcgaggtcaccctctccaccctcggcgccgatgtcgcccgcggcaccttaaccggcaatgccaaacgcagcgccgatggcagctggcgggtggataacctccagctcaacgagattcgactgcagagccccgcctcgctggccgagtttttcgcgccgttaaccacggtcccctctctgcagattggccgcctggacatcaccgacgcccgcctgcagggaccggactgggcggtaaccgacctcgacctgagcctgcgcaacctgacccttagccacggcggctggcagagcgaggacggcacgctgtcgatgaacgccagcgaatttatctacggttcgctgcatcttttcgacccgatcctcaatgccgaattctctccccagggcattgcgctgcgccagttctcctcgcgctgggagggcggcatggtgcgcacctccggcaactggctgcgcgccgggaacgccctggtgctcgacgataccgctttcgccggactggagtacacgctgccggcgaactggaaacagctgtggatgacgccgctgccagcctggctgcaaagcctgacgctgaaaaaattcagcgccagccgcaatctgatcatcgatgtggaccctgctttcccgtggcaaattaccgccctcgatggctatggcggcgagctacagctggtgaaaaacggcagctggggagtatggaacggcagcgcgacgctgaacgccgcggcggcgactttcaaccggatcgacgtgcgccgcccatcactcaaactgaacgccacagcctcgacggtcaatatcactgagcttagcgccttcaccgagcgcggcattttgcaggccaccgccgcggtatcccaactgccgcagcgccaggtcaatctgagcttcagcggccgcggcgtgccgctgaatattctgcaggcctggggctggccgtcgctacctataagcggggatggcaatctccagctgaccgccagcggcagcgtgcaggccgatgccccgctcaaaccgacggtcaacgggcagctcagcgccgtgaatatggagaaacagcaggtggcgcaaatcatgcgcaacggcgaggtcagccccgcccccgccgcgccagcgcccgctcccgtcaccccatagcgatgccccattcccctctcctctatggggagagggattgcttcccggcaaaactccactctgacaactctctccctttcagggagagagttggggtgcgagtcctgaaacctgtgcgcaatacgcggctatctgtacctatttagcgcaacaggttcctttcaaatatcagagttgctataaccaaatcactggaagtcgataaaaaaccgctccctgtacctacaaaaatataaaaggatcaatcatgcctgaaatacgtcagcgtattctggagaatatgcaaaaattctcccgggccatgatcggcgccgtattgttcttgccggtcattggcttaattctggccctcagttcagtattaactaatccgacattaattgctgaaaccagtttcttacatcagcttgggcaaatgctcggcgacaccttttggcctttatttggcaacctcggcttattattttgcgtcggcataagctatggcctggcaaaggataaaaaaaccgaagtcgcactggtttcagtgatgtgctttattatgtttcttggcgccaaccactcctggctggaacacacccatggactcgccgaaaaaattaacggtgaatattatggcaccgggcaaacccagctgctgggctttgtggtggtggatatgggcgttttcctgggcattattctcggctgcacgattgcgtgggtgcacaataaagtctctgccattgagctgcctggcgcgctgtcgatgtacggcggcgccaagctgacgctggtggcgatgacgccggtggttatcttctacgccatcgcctttacctggatttggccctttatgacccacggcatctccgccctcaccggttttatgaaaaatgccggggtcgccggggtcttcgtctatggtttctttgaaaaattccttatccccaccggcctgcaccatttcgtctggtcccccttccagctcacccagattggcggcacgctgaacgtggatggtcaggtggtctccggcacccaggccatattcctcgcctatatgcgccatcccgacctgacgccggtcatgaacgacgcattacgtttttcgcagcaagggatgaccactatctttggcctggcgggcgcctcgctggcgttctaccacaccgcgaaaccggagaagaaagcgatggcgaaggcgattctgctaccggcgattatcacctcgatgctgaccggcatcaccgagccgattgagttcaccttcttatttgtctcaccgctgctgtgggtgatccacgcgacgttaaccgccgcctcgcaggccatttgcgacatattcaccgtacgtccctggggagcatcgggcctgatcgagtttctgatctataacctgccgctgccggtctccttaacgcgctggccgggctatgtccttatcggtatcggccagttcgccgtctactacgtgattttccgcaccctggtggtgaagctgaacctgaaaacgccgggccgggaagatgacgagaacgtgaagctctacagcaaagcagagtaccgccagaaagtcgcgcaaccgcagtcggtcaccgatgacattatccgcggcctcgggggcaaggagaatattctctccgtcgataattgttttactcgcctgcgcgtggccgtgcgcgatatggcgcgggttgatgacacgcaattaaaaaataccggcgccaacggcgtcgtacgcaatcgaaatgaagttcaggttatttatggcgtcaaagtgggacaggtacgttcccgggttgataactggttagcagaaaattaatgaggagtatttatgaaattaaccgtattaggcgggggcggcgttcgctctgcatttttagcgaaatctctggcctataacgctcaccgcattggtttaacagaagtcgtttttctcgataactctgctgataatctggcgatatttggcgaaattgcccgctatgtatttaataccattcgcccggatattcagtttagtaccaccaccgacccggtcgcagcgctgcaggacgccaactatatcattaccaccctgcgggttggcggcgatgaaagccgcattcgcgacgaacgtattgcgcttgagcataacactctcggccaggagaccaccggcgccggcggtttcgcgatggccatgcgctcgatcccggcgatccttcgctattgccggctgatcgaagaacatgccgccgaagacgccattctgtttaactttaccaacccgtcaggtctggtgacggaagcgattattaagtccggctttaagcgccgggtctatgggatctgcgatgccccctccgagctgattcgtgaactgccggcgatccttggctgtgaggagcgcgacctcagcgtggaatgctatgggctgaaccatttctcctggtttacccacttcaccgtccgtggggaagaagtgaccgaacggctgatcgccagcccggaactgtaccagaagacggcgatgcagtacttctccccggagctggtacggctttgcgataatcaactcctcaatgaatatctctattattactactatcgcgacgaggcgctgaaggcgattcagggggccggcgagacgcgcggagagcagatcgcccgcatcaatcaggagatgcgcgaggcgctgcgcaccgtggatgccagaacgcaaccggaggccgccttcaccatctggatgcagcattacctacgccgggaaaacagctatatgcagaacgaatcccggcaggagaaattccacacccgcgaaccgctgacgctgcgccagtttatcgaagagccggacaccggcggctatgccggagtggcgctggatatcttggaagcggtgaacagcaccaccaccaagcggatcgtggtgtcgatccagaatcacgacacgctcgattttttacgcccggacgacgtgatcgagatcagctgcgacctgagccgggatggcctcaagccggtgacgccggtgaaggtaccgacggcgcagaagaatatgattgcctgcgtgaaggagtatgagcggctggcggtggcggcgatcctgcagcaggataaatcgctggcggtgcgggcgctgatggcgcacccgctgatcggttcctattcgctggcgaaaaccctggtcgaagcctatcttgacgatgagcagttcgccgcctggcggtaatccgctgccgatgggattcccccgctcgcaccgcgcttagcgggggctaactattgctacgtaggctggtaaaccacatcttcaatagtcgctcaaagcctaagatgcagtagccgaaaaacgggttgctccagtaaatatcatcatcgaacttctgcgggtcgtgaataataaacgccgtatccgcggcctgcgccagcgggctttggtagtcgccggtaaagcagaccagattaatctccttcccctccagggccttaatccagttgagcgccgagctgctgcgcccggatttagaaatgatccagatggagtcgaagcaggcggcgtttttctgttcgaggatttcgtaatcgggccacagcgccaggctggcattcacgccggtgacgagaaacttgttgtaaatatactgggcgatcagctgtgaaaagccgctgccgtggatcaggatgcgctgctgtttaaggcttgccagcagcggcgtcagcgcttcttccggctgaacgctcatgtagtcgatatcgttggtgacatcgagcttcggcatggtgatattgaacttgataaagtaaaccagctccagccagccgctgaacttcagtttctttgccagccggaccagggaagaggggttgctgtagcactgttcggccacagcgcgaactccctggcggatacactgctccgggtcgttctgaataaagcgcagcacggtcatttccgttttgcttagcttcacgtcacgaaagatattttctacgtccatggcgggctcctctcagcggcagaatacgctaacaccgttcgacaaccgcgtctgcggcctgagtcaccacaatgaaatgaatgttactttttgtacaaaaatggaataaaaaaaccctctccgcctggcgaagagggctgctgctgttaacctatttacaacgtaatcgtcagcgtattgccctcggcgctcaccaccacgcccagttcgctaccggtctgcgtaccgccctgcacgcccgcgacctgcgggatattgcgcaggcacagcgtccagccgcgggcctcgccttcgccgctcacagcgatggcgttgccctggcgcctggccttcagggtgaagatcgtcgagccgtctgccgccggaacgtcacagcgtgcctcgcgtccatcctcaaggtggaacagctggaaggcggtgccctcatgccaggcgtaatccggcttctggtcattgttgcccagcgccagcaggctgttgtcgcgaacgtagaccggcaggctcagcgcatcgtgatgctgcttatgccagcggctacccggcaattcatcgttatgccacagatgcgtccagtgcccttccggcagataaaactgcacttcgccggcctcggagaacaccggcgccaccaggaccgaatcgcccagcatatactggcggtcgagatagtcgcaggccggatcgtccggaaactcgagcatcatcgcgcgcagcatcggcgtgccgcactcgttggccagcgccgcctgacgatagagatacggcatcatgcggcatttcagctgcgtgaagtggcgcaccacgtcgcaggactcgtcatcgtaggcccatggcacccgataggatttgctgccgtgcagccggctgtggctggagagcaggccgaaggcgcaccagcgcttgtagacgtgggccggcgcggtgttttcgaaaccgccgatatcgtgactccagaaaccgaagccggacatgccgatcgacagcccgccgcgcaggctttccgccatcgattcgtagttggcgtagcagtcgccgccccagtgcaccgggaactgctgcgcgcccaccgaggcggagcgggcgaacagcaccgcctcctgctcgccgacggtctctttcagcaccttccacaccagctcgttatagatgaaggcgtagtggttgtgcattttctgcggatcggaaccgtcaaaccactggacgtcggtcgggatacgctcgccaaagtcggtcttgaagcaatcgacccccatcgccaccaggccttttagtttgtcagcgtaccactggcgggcttccggattggtgaagtcataaatcgccagccccggctgccacttatcccactgccacagcgaaccgtccggacgcttcagcagataacccttctctttcagctctttgaacaccggcgagcgctgaccgatgtacgggttgatccacacgcagaccttcagccctttcgccttcaggcgcttgatcatcccttccgggtccgggaaagttagcggatcccattcaaaatcgcaccactggaaggccttcatccagaagcagtcgaagtggaagacgtgcagcggcagatggcgctcagccatgccgtcgataaagctattcaccgtcgcttcgtcatagttagtggtgaacgaggtcgtcagccacagaccaaacgaccatgccggcggcagcgccgggcggccggtgaactgcgtatagcggttaagcaccgctttcggcgtcgggccgtcgatgacgaagtactcgaggtattcgccttcaacgctgaactggactttagagactttctccgagcccacctcgaaggagacgcgctgcggatggttgaccagcacgccgtagccgcggttggtcagatagaacgggatatttttgtaggattgctcggtgctggtgccgccgtcctcgttccaggtttctaccgtctggccgttgcgcaccagggcggtaaagcgctcgccgaggccgtagacggtttcgccgacgccgaggtcgaggcgctcaaacatgtagttgcgctgggtcttactatcctgcacgtagccgttgttttttagctggctaccggtgatacgcaggccgtcgcgcagaaaatccagcgcccagaattcgcctttagtcacccgcacgctgaggctgccgcttttcagctcggcgaacccggccgtattttctatttcgacatggacgtctttctgcacgttcagcggatagtgcgggccgttatccagcgcgccctggaagtgctccatacgcacgccgattatcccttcctgcggcgagaaaaagcgcagggtgaacaatggcgtatccagctgccaggcgcgttcgcggacatcgcgcggcgcggcatagaccaccatttcattcccctgctgctccacctcgtaaacctgtacgggttggatcaggttgagccctggttgaatgagccagtttccatcactgattttcattaaaacgtcctcttagttttgccattctttgtcgatcggggcggcggtgaaatcttgttcgttgcgacgcgcgccctcggccagctcggccatcatttttttcaggaacggcgttttcagcgtgtagtagcgtttggcgatcaccgcgctcagcaggtagcacaccgccggaacgagggtgaacaaggcgataatgatggtgagggtggcgctgttctgggttttagcggcggcgtcatagccgccgccggccagcatccagccgatcagcgcgccgcccagcgccagccctaacttgagcacaaacagggtaccggcgaagctgatgccggtcaggcgtttgccgttacaccattcgccgtagtcgacggtgtcggacatcattacccactggattggcgtcaccagctggtgcagtacgccaatgacgaagataaagacaaacatggtgatttcggcgtccatcggtacgaagaacatcgccacgctgagcaccgccaggagggcgttggtccaccagaagacgctgactttgcatttccagtcggtcagcggtttcgccagcgccgagccaatcaggttgccgacgcagtaggtcgtgaggaaggcggtgaacagcgccgccgagcccatgatccaggtggtgtaatacatcatcgcgccgccgcgaacgcagaccgcgaggatattgaggatggtgagcacgccgaccacccgccactggtcattgcgccagatatcgcgcaggtcttcacgcatcgaggtactgctcggcggcgcttcgacacgctctttggtggtaaagaagcagaaggccagcatcaggaaggcaatcaccgacagcaccgcgatgcccccctggaagccgagcgctttgtcttcgccgccgataaagttgaccagcggcatcatcagcacggtggagagcatgccccccgccgtcgccagcacgaagcgccaggactgcagcgaaatgcgctgcgtcgggttgtcggtgatcacgccgcccagcgcgcagtaagggatattcaccacggtgtagagcagggtcagcagcgtgtaggtcacggcggcgtagatcagcttgccgttgtggcttaaatccggcgagctgtaggccagcacgcagacgaggccgaacgggatagcgccgaagaggatccatgggcggaacttaccccagcggctgcgggtacggtcggcaagcagacccatacacgggtcggaaatcgcgtccagcgcgcgcgccagcaggaacatggtgccgacaaagccggcggggataccaaaaatatcggtgtaaaaaaacatcatgtacaacatgacgttatcaaaaataatgtggctggcggcatcacccatgccataaccaattttctctttgacggacaaaatgtgatctttcatatgcgcactattcccttagcggcaccgagggttggtaccggttacggtttttgtaaacctttgccgcactaagatgaattgcgatatctcgttatcagattacgtttcttgttttctgtgatcgcggtagggaatcagggagtgaaaaagtgtaactcacggattttgtgaggatttgtccaggactgttctgtaaagtccagttttaacagtaaaaaagtgcgtttaggtatgtggtaaacggctgaaagtagctataatgcgccccgcctccatgtagcaatcgaggcgcggaagatcgtcatctccggtgaggtggctggacttcaaatccagttggggccgccagcggtcccgggcaggttcaactcctgtgatcttccgccagtttgcccctgctcccccacagccactccctaccaacctgagccccccaaactcatcatcccagccaatcatttttatccaaaccctgcgttattttgtctctcgcaaacccgttacactggcgcggtggccgcgtgccgttagcaaccgaaacaggagatccataatgacccccgaactcagacactgtttttccattaccatccaggttgataaaccgataatcgtctcccgcagcccgcagaccggtaagcgccagctgatcccgattgtcggcggcagcgtctcgggtcaacttcgcggccacgtattacccggcggcgtcgacagccagataatcgaacccgacggcacctgcaggctgtccgcccgctatgccctgcaggtggcggaaggcacggtctatgtggaaaacaatggcatccgccgggtgccggcccagtatcatgaccagcttttcgccgacgatatgcgcttttttagcgatattccgccagaagccatctattttcgcaccgtgcccacctttgaggtggatgctcccgcgctcagctggctaaccacctcgctgtttatctgcgccggtggccggacccaggatggggtgatgctcgacttctatcaggtgggctgattttcactttctgcatataactgttattgccgttagcccgtttttcccctcccggcagcggtctacgatggctccatcttttcattcacccgaatcacagaccggagcagttatgaaagctatcgccattactcaagccgccgctgacggcaacaacatcccttctttaaccgagatcgacctgccgatccccaccgcccacgggcgtgatctactggtcgctgtgaaggctatctcggtcaatccggtagacaccaaagtgcgcgccggctttcagggcgacacgccgcgggtgctgggctgggacgccgttggcgtggtgcagtccgtcggtgaggaagtgacgctgttcgcgcccggggacgaggtctggtacgccggcgcgctgggccgggccggcagcaacagtgaatatcagctggtggatgagcgcctggtggcgcacaaaccgcgcaccctcgataatgcctccgccgccgcgctgccgctgacggcgatcaccgcctgggagctgctgtttcaccgtctcggcgttgaggaaggcggcaatgcgggcgacacgctgctaatcgtcggcgcggcgggcggcgtggggtctatcctgacccagctggccagtaaactgaccgccatgacggtgatcggcaccgcctcgcgtcccgagagccagcagtgggtccgcgaggcgggcgcgcaccatgtgatcgatcacagcaagccgctcgccgacgagctggcgcgcattggtatcacgtcggtaacccatgtcgccagcctgaccaataccgagcagcacttcaacgcgctgatcgacgccctcgccccgcagggcaagctggcgctgattgatgacccggagaccctggacgtggtgccgctgaaagcgaaaagcctgtccctgcactgggaatttatgttcacccgttcaatgtttgagacggatgatatgatcgcccagcatcagctgctcacccgcgtggcggcgctgatcgacaaccacactatcaaaaccacccttggcgaacactacggcgccatcaccgccgccaatctgcagaaagcgcatcgccagctggaaaccggacgcgccgtcggcaagatcgtgctggaggggttttaagatgatatcgcttatcgccgtgctcaaggcgaaaccgggccaaacggacgccctgcgtcaggccctgcaggcgctgctcctgccgacgagacaggagccgggcaacctcgactatgccctgtttcagctgcgcgacgcgccggacaccttctatatgcgcgaggcgtggcagggacaggacgccctcgatgcccatgtcgcgatgccctattttcaggcgtttatgacgcagatggagtctctgctggctgagccgctgcggctggactttctgacgccggttgagccttagcccaccggctgacgaggggtgggaaaatcacgcccctccgccgcgcgggtttaaaagtgggcgggaagcgtgcgggttatcttttccagcaccccgcgatggaccgtaatgtaaccacctttgcgcagctctgccagaatcgacataacacggctgcgcgacaggttggtgcggcgctgtataaagcttaacgcattaatttggcgacgatactcctccgggtagtccgccagctctgttagcagggttcgcaccatcggataagaatccacccccaccatctcctgcgaacgcatgctcaacaccatcagccgctgcgccagaacatgggccatctcctgccacaggttttgcgcattgaggatctcgaccgcggcctggtgtcctatccagcgtccgcgcaaatctgtctcagcaaacagagagcagtggtgtttttccggaataccgttaaagacgccgtaaccatcgattaatcccaatagcgaaggggcaaatatcgttgatatcaccatgttgttttccgcatggcatagcgaggcaatcccctcttcgagcagaattaatccggattcagcctgggtcggcggaaaacgataataggtcgatcgcggcagcgcaaagggtgagctggcgggcaggaacgcagataacagggattccaccgcgaataacggctttgtctgtcttccgtagtaaaaagacggtaacgcctggtcagtagagaggctggctgcagggatcgacatggtttttatgccatcaggtcaggttgaaaaagtgattcgttgagaatcatagtatcaacaggtgaattaacgaataaaagacaagacgttacgaggataaaaagagtgtaagcatcattatctgcaataactatttatctctattttacaggaataaaaaatacgatgagccttaattacctataaggcttagcggcgataaagataaggccaccttattatttactgcgctggctaacgccgcgcctgagggtttctctaccgctttccccctcgcatctcggccagtccaggctacgcttatcgatgccactgaccacccgcattcccctcccgttctattgagtccattcatcaagaagaggtttcgctatgctgatcaacgctattggtacctactccgccagccagccgctggaatcaatggccatcacccgccgcgacccggggccgcaggatgtacagatcgccatcgcttactgcggcgtctgccactccgatctccaccaggcgcgatcggaatgggcaggaacgctgtatccctgcgtgccggggcatgaaattgtgggtcgggtgaccgcggtcggcaacgccgtctcgcgctacgccgtcggcgatctggtgggcgtcggctgtatggtcgatagctgtcaacagtgcgaagagtgcgccgaggggctggaaaactactgcgaccacatggtgctgacctataacgggccgacccaggacgcgccgggacacacgcttggcggttattcacagcagatagtggtcaatgaacgctacgtgctgcggataacccatcccgaagcgcagctggccgccgtcgcgccgctgctgtgcgccgggatcacgacatactcgccgctgcgccactggcacgtcgggccgggtaaaaaagtcggcgtggtcggcatcggcggcctcgggcatatggggatcaagttggcccacgccatgggggcccacgtggtggcttttaccacctccgaatccaagcgtaatgcggccagagcgctgggcgccgatgacgtagtggtgtcgcgcaatgaagacgaaatggcggcccacgtcaaaagcttcgatttcatcctcaacaccgtggcggcgccgcacaatctcgatgccttcaccacgctgctgaaacgtgatggcaccatgacgctggttggcgccccggccacgccgcatccgtcgccggaagtgttcaatctgatcttccgccgccggtcgattgccggctcgatgatcggcggtattccggaaactcaggagatgctcgacttctgcgccgaacacggcatcgtcgccgatatcgaattgatccgcggcgatgagatcaacgaagcctgggaaagaatggtcaagggtgacgtgaaataccgcttcgtgatcgacagtgcgaccctcgccggctaagcgccgcgacgaaaggtacgccgccattccgtcgggctgacgccaaagcgcgctttaaactgctggcgccaggtgaccgctgaaagatagcccaccgcctccgccacctgctcgaccggcagatcgcccgcctcaagcagagcctggctgcggcgcagacgttcggcggtcagccagtcggtaatgctcatcccggttgcccgggcgaagtggcgggtcagggtacggcggctcatcgccaccacccgggccagcgaatcgagactgtgcggctcggcaatatgctgctgcagataatccagcaggcagttgattcgcgcatcgcgggtgtttttcggcaccggctgggcgataaactgcgcctggccgccctcgcggtgcggcgaaacaatcatccgccgggcgatctggttggccgcgaggctgccgaaacgctggcggatgatgtagaggcaacagtccagcgccgccgcggtgcccgccgaagtaatgatccgctggtcgtcgacgtacagggcgttgatatccagctgcacctgcggaaaccggcgctggaaatcctgctcgaactcccagtgagtcgccgctcgcctgccgtccagcagcccggcgtagccgaggacgaacgcgccgaggcacaggccgacaatctccgcgccgttatcccgggcccgcaccaggctatcaagcagcgcctgcggcggacgtcgatcgacctcgccccagtaaggcaccaccacgatatccgcctgttccagcgcggcataatcgccggtggcgtacagcgcaaaaccatcgcgggcgctcagcagccccggccgctcggcgcaaatgtgcagattaaagcgtttgatttccgaaaccgaatcgccaaacagcatgcaggggacggcgtagtgaaacgggctaaagccctctacagcgacaatcgccacgtcggtgagtttcatcgtcccttccccttacgcatgttaataaacgacggtttctccatcctgcggaatagaaaccacatcggcaatctgattatccagcgcatactggcgcatctcttcccggctcaccaggcagtggttgaccgcctcgaggtggatagccatgatttttgcttccggtagggtgaagtgcacgttcaggagatcttccttgcccatgataatcgggccaaagccgatgacgtgggcgtagccggcgttgaggaccaccacgtccgggcgcagcttcagcaggtcggctgcaatgtcatcgcgccagatagtatcccccaccagccacagcgtcttctcctgcggatggcgaaacaccacgccgcaggcctcgcccaggcgttcagccatcgccggcaccgcgtaggtccggtcgctgccgtgttggccggaggtggttttctgcaggcgcacgccggcaaattcgctgtctgccgacagcaggcgcagatcctgaaatccctggctgcgcagcagcgcggcgtcggcctcatgctgggcgaacaccggcagggttttcgggatcgcggcgatcgccgccgcgtcccagtgatcgtcatgggtgtgggtgacgatcaccgcgtcaacgtcgacaattttatcgcgggaaaacggcagctcaaccagcggattgcgcagttcgctgcgcgcggtgcccggaaaacccggccaggcgcctttgtccgccagcatcggatcgatgagaaatcttttcccggcgtagtgaataatctgggtcgcattacggatgtgggtgatgttcatgttggcgttcctctgaggtcatctgacgaacatcgtactgagtccccgcctggctcaacaggggcgtttgggcaatgatcgatgaaatcgggccaacctgcggcggttgccatccgcctccggctatgttgttcttaaggctcaatttttgacaggagtggcaggatgaaaaagaaactgaccgccgccgatatgcacgacccgcaggtcatcgccgagacgccgtggttcagcatgcgtaaggtgggtattgatgtcgcccccggcgagcgccgcgacttttattccattcattacccgcgcccggcggtggggattgtggccatccaggatgagaaggtgctgctgattcgccactaccgctacctgatcgataaggtggtgtgggcgatcccttctggcggcgtcgatgaagaggaagacccggcggtcgccgcgctgcgcgagctgcgggaagagaccggatggcaggcgcaacgcgttgaggagatcattcgctttaacccctcctacggcagcagcgatcagctgtttatcacctggctggccaccggtttacgctgggtggggatggatgcagatcaggatgaggtgatggagaccggctggtttaccttcgacgagataaaccagctgatcgcccgcggcgagatgccggacgggctgtcgctggtgccgctgctgcagctgatggcgcagcggcgaagcggctcgcttacggcttaagcatccgccagcggaaccacagctgggccacgaggatcagcacgccgcctataatcttctgcagcggcagctgttcgccgtaccacagcgcggcggcaatgaccgtcagcagcggttcaagcaccatgatgatcgccgcgctggccaccgccgcgtacttctgccccttcatctgcagaccgaagcgcaggctggtagcgatgacaatgctggccaccaaccagccgagagtcggcagggtcatcggctggtcccagcgttcaacggcagcggagatggtcaacccgacgataccggtgatcgccagctgcacggtggtcagggggatcagcggtacttcacgcgcgcagcggctggtgtaacagaaccagatcgactgcaccagcgccgtcagcaaaaaccagccctggctggggtggaaggctatcggcatatgcagactgagcagccccaggccaaccaccgcaatcggcaggcactcccaccaggcgcgcggcgggcgcaccttcatcatcacccatgcggtcagcgggacgaacatcatcgacaggctcatgataaacgccccttcgccgagcgacgccgtcgtggagaccgaatagatccacaggcagaggttgagcgcaaaccagagtccgctgatgatgagttttggccagtgctgcttttgcgggcgaaaaccgcggcagaacggcagcagaagcagcgcggcgaagaaaaaacgcagcccaagaaacgcgaacaccggcatgccggcgatcgcctcgcgggaaaatatccagccgcaggcggcaatcaccgtcgcggcaatcagcagcaggtcagcctgccgttggcgtaccatacgcgcctctccctgtgtgttggcttaccagccaggcaccgcgccgccgttgaagatagtctctgccgccttcgccacctccggcgactggtacgactgcataaactccttcacgttttgcgcgtctttattgtcttcccgggtcacgatgatgttcacgtagggcgagtttttatcttcgataaagatgccgtcacgaaccggcgacagcccggtttgctgcaggtaggtggtgctgatgatagccacgtcgactttgggatcgtcgagtacgcgcggcagttgcgccccttccagctccatgatcttcaggttacgcgggttgtcggtgatatccaccgccgtcggcagcaggccggtcccggctttgagggtaatcagcttctctttttgcagcagcagtagcgcccgcccgaggttggtcggatcgttggggatagcgatcgtcgcgccgtctttcagttcggcgactgacttgatcttgcgcgaatagccggccatcgggaagacgaaggtattcccgaccgccaccagatgataattatgcgctttgttgtcctgctcaaggaaaggccgatgctggaagacgttggcgtccagatccccggcgttggtcgactcgttgggcagcagtgagccgctgaaccccaccagctcgacctccagaccgtacttctctttggccaccttcttcgccacttccgccacatcctgctcggcgccgttaatcacaccgaccttaatgtgcttcgcttcattacccttttggtcgcagccgaccagcgccagacccgccagcattaccgcggcggcggcctgtaaacgtaatctcatcctcttcaccctgtctgtcctgaatgtcattgttttttttcgtacaaaactataacgactttcgggtcgggtaataaacagcaaaccacgcaactggaaataaaatcatcttcgcgaaacgcgaggcgctagccccgtcgccactcgcccggcgtcacgccatagcgcattttgaagcgcttcgagaaggaagcctgcgactgaaagccgcagcgttcggcaatgacctcgaggttggtctgacgctccaggcgcagcagccgggcggccagcgccattcgcaactgcgacagccacgcctgcggcgtcaggtgatagacgcgggcaaaatgacgggcaaaggtggcccgtgataaaaacgcgcgggcggccatactctccagcgtccacggttgctccggggtcgccatcaccgccagcaccgccggcatcaggcgttcatcgctcatcaggcgcagcagcccgccgggcggctgttgctcgccaagcagcatgcgcagcaggagcaccagcagcgtatcgccgaggctgcgcacgatagcgctgccgccgggacgctgcgccaggctctcgcgcaccagtatattaagcagcgcgtccagctccgggcagtcttcacgcgcatcggtatggagatggatcagcgtcgatgcttcactgaacagccagctgacgtgcggaccaaaatagaattcgccgcacagcatctccagcgccccctccgccgggccggcgcgcatttccgtcaccgtgccgttaaaccggtgcgccaccggcagcacctggccccactccaccaggctctccatcaggtgcggcgaaccgtggggcaggaggacgacatctcccgcgcgcaggtgatgggtctggccgccgacgttgagccgcccctcgccgcgcagcaccacgtgccagggcaccacgccgctgcgcatttgctggtgcccggcctgccagcggccgccgaagcgacagtgcaggttcacttcgcagcgcggcgccagcagcgccagcagatgactgagactgtccatgcttctcctgagacgataagacaaaaaggtgagacgaagaccgccagtctagcatgcggcaagcgcctaagatgaccccattgccaacacaccctcgataacaacaggagttaaccatgagccgtttagcagatatccgtgaacaagacgccaccggcaaagccgccgatattttcgccgggatcaaaaaagcgatgggcaaagtgccgaacgcctacctgaccatcggcggccactcgccggcggcgctgcagcaggcgctggcgcacaatgcgatgctccataaaggcagcctcagcgcccagcagctggaagcgattaatctgtcggtcagcgaagccaccggctgtgactactgcctggccgcgcacaccctgatggcgaaaaaagctggcttcagcagcgagcagatccacgccctgcgccgcggggagtatgcggaagagacgcagcttgatgcgctggtgaaattcgcgcagaccctggtgaccaccaccggtacgctgccggaagccgacgtcgccgcgctgcgcaacgccggttttagcgaccagcaggtgattgagattatcagcgccatcagcgccatcctgttcaccaacatggtgaaccgggttaacgacacggtagtcgacttcccgaaagccgattaatccgtcgcgcagcgccggttttacagccccagatcgctgagccccggatgatcgtccgggcggcgcccctgcggccagtggaacaggcgctcgctttcgctaattggcagatcgttgatgcaggcgtagcgcgtctgcatcagtccatgcttatcaaactcccagttctcattgccatacgagcgaaaccagttgccgctgtcgtcgcaccactcataggcgaagcgcacggcaatgcgattctcctgccatgcccacagctccttaatcagccggtattgctgctccttgcgccattttcgctgcaggaactcaacaatttgcccccgaccgtggacaaattcgctgcggttgcgccattcgctatccacggtgtaggccagggcgactttttccgcatcgcggctgttccagccatcttccgcggcgcggaccttctggatagcgctgtcgcgggtaaacggcggtaacggaggacgttgttcggtcatgcttactctcctctacgggctaattgctgctgcaggcgctgattctcctgctccaggtcatgaatacgttgctgcaggttctggctgtactccgccacctgctgcgcgctgtagcgcggcgtaatgtgctgcgggcagttccagtcaaacgcctgcaaatgaaaaagaaacagacgttcaatgcgggcgcgatagttggccggcgccacctgcgccagcagctgcgggtggtcctctgccgccaggacctcgacggtggcgtagattttcagcctggcacggcgcggataatccatcaaaaacaggcaggcccggtcgctgccgcgcagattgccggtagtaatgtactggcggttaccaccgaaatcggccatcgccagggtggtgtcatccagcagatgcagaaaccccggcgggccgccgcgatgctgaatgtagggccagccgctctgcgacaccgtcgccagataaaagctgtcgcgggtggcgatcatccccgcttcgctgtcgccgaagcggtcggcctggcggcgactgcgcggcgtttgccacagcgagtcgctgcccatttcatgctgcacatccatcacgtccggggtgatagcgatatcgagaaaggttgctgccatagcgcctcctgttgtctggcgccatcatggactgtactgtgaagaatgataatacgggtaaagtggcaatcatctttccgcaaaacgggagaataatggatcgattaagcgcgatggcgctgttggtgaaagtgaccgagctggggagcatgtcggcggcggcgcgggcgctgaatatgccgttgaccaccgtcagccgccatattggcgaactggagagcgcgctgggcgtacgcctgctggcgcgaaccacccgcaaactgacgctcaccgacgccggggtcgattatgttgccgccgcgcggcggatccttgaggaggtggaaaacgccgaacgccaggcgacgggcgaatatcaggaaccgaagggcgagctggtgatctccgcgccgacgatgtttggacgccagcacgttcttccggtaatcagtgaatttatcgcccgctacccgctaattcgcgtccgtttgctgctcagcgatcgcaatgccgacctggtgagcgaccatgtcgatctggcggtgcggattggcgacctggcggacagcagcatggtggccacccgcctcggcaccatgcggattgtggcctgcgcccatccggcgctgctggcgaaatacggcgagccgcagcggccgcgcgatctggcggcgctgccgatcatccgcattgaatcgccgatgccctatcgcggctggcgctttcgcgccgctgagcgcgaggaccagctgattaacctgccgccggtgctatccgttaccacgccggagagcgccgccgatgccgcgcggctgggggtgggggtggcccgcttactgcattatcaggcgctggatggcctgcgccacggggagctccgtctgctgctggaaaacgtcgagccggatccggcgccggtccatttgctgtataccgctcgggatctggcgccgcttaagctgcgcaaatttatcgattttgccgcaccggcgctgcgtcaggcactgctgcgcatcgccggggccgcttaatgcgtcgcggtcttcagcggcgcctcctttaacagccatgagaggacaaacgccaccgccataatgccggccgccatcagaaacgccgcgtggatcgccgcgccgaaggcgtcgaggtagtcgaggcggatatccgcgggcaggtgctggaccgccaccggattcattcccggcggcagcaccgcgccttccggcagcagttgttgcaggttgctctgcagcacgtgcgtgaacaccgcgccaaacagcgccacgccgatggagccgccaatcgagcggaacagggtcgcgccggaggtggcgacgccgtacatctgcgccggcatcgcattctgcaccgccaggaccagcacctgcatcaccagccccagacccgctcccagcacgccggtaaacaggtacagctgccacagcggcgagtgaatggtgatgcgggtcagcagtaccatgccggtcacgccgagcagggtgccgaggatcggaaacaggcgatatttaccggtacggctgataatccgcccgctgataatcgaggtcagcagcaggccgcccatcagagggatcagctgcagcccggcttcggtgggcgtcgcctccttcaccacctgcagatagagcggcaggaaggtgactgacccgaacagcgacatgccgatgacgaagccgatcaggctgcacagtaggaagctgcggttgcggaacagcgccagcggaataatcggctcggcggccatccgttcttcgtaaataaagccgatgatccccacgatgccgaaggccagaatgcaccacagctgcgggtcattccacgcatggacgctgcctccttccgaggtaaacaggatgatgcacagcagcgccatgctgagataaatcgcccccagccagtcaatctgatgctggctgcgtttattgctgctgtggaataccgcgccgatcaccagcagcgcgaacaggccgagcggcaggttgatatagaagatccagcgccaggaggcgtgctgcaccagaaaaccgccgatcagcgggccgatcaccgtcgccaggccgaaaacgccgccgaacagcccctgatagcggccgcggttggcgggcgggatgacgtcggcgaccgccgccatgctgatcaccatcaggccgccgccgccgagcccctgcaggccgcgcatcagcaccagctgggtcatattctgcgccagcccgcagagcgcggagccgacgagaaacagcccaatcgccacctgcagcacaattttgcggccgaacagatcgccaaatttaccgtacagcggcaccgcgatggtggagctgaggatataggcggtgaccacccaggaaagcttgtccagcccgcccagttcgccgacaatcgtcggcagcgcggtggagacaatggtctgatccagcgctgaaagcagcatcaccagcagcaatgcgctgaacagcaggcgtatcgactgcaccggtgggttagcaacttgagaagtcattgcaacgctcgcttgaaattaattaaatgcataattaatatttagtgaaagaatgagtcgggtcaagagatcgccatatcatgacagcacaaaaggatcaggatgctccccgccgcccgggtcggccgcgcggtaaaaaaccgggtaccgccaaccgcgaacagttgatggacatcgccctgacgctgtttgcccgcgacggggcgggccgcgtatcgttgaacgccatcgccaaagaggccggggtgacgccggcgatgctgcattactacttcagctcgcgggatgcgctggtgactcagctgattgaggagcgctttatgccgctgcgcaatcacatcagccgcatctttgtcgatcatccacaggacccggtgctggcgctgacgatgatggtcgagacgctggggcatatggcggagaaaaacgcctggttcgcgccgctgtggatgcaggagatcatcggcgagatgccgattctgcgccagcatatggatgcccgcttcggcgaggagcgttttcaggtgatgctggggacggtgcgtcgctggcagcaggaaggcaagatcaatccggcgctggcgccggagctgctgtttaccacggtgattagcctggtgctggtgccgttttcgcgcatccacagcgatccgcgtttacaggcggtcaaccgccagaccatcgtcagccacgcgctggcgttgatgggccacggcgtcgggggttaagcgcagccgccgcccggcaaatgcttttgtagcccggataaggcgccacgcgccgccatccgggattttccctgctcgcgctacgcttagcagggctacaacttctatgttaattcccggcagattgcgctcccgatatttcttctgcgctatgtctcttatggcgcagggagcgcacagggggcggccagtcgccgccgccccctgtacccccgggctccggccagcaaaatcgccgctacgcggtcccttcgacttatccctgcaggcttcgggtcgggccgaggcagcgtccgtgcaaaacacggccctcagcccgcatccatgcgggctgccccggccttccgggaacgtctcagcgattttgaggccgccagcaccggcagtttcagtcgcgcaagtgggtatatcaacaactggtcgcacgacccccaggacgggtaaggcaacagccgccacccggcaagaatacaggtgccgtgcctgatatcctgcccggcggcgctgcgcttgccggtcctgggtggggcgaaactacgggaggactgtgtaggccggataaggcatttatgccgccatccggcacaaccacaggtgcggtacctgaccgcccggggataccaggatcgttacagcgccttcgacaaatagtggcgctgcatgcctgcgtgcgggaagtcgggcagcgacatctgcagctgatagcctaatttctgataaaacggcagcgcctggaagctaaaggtatccaccagcagatggctgcagccttgcgcctgcgcctgctgttccgcctcctgcatcagttcgctccccagcccgcgcccgcgcgtcgtctcgctaacccacagatactcaatgcacagccagttgcccttgcgtttggcaatcagcccgccctgcattaccccttgcgcatcgcgcgagtaaatccccagatcgccaaactgcgccgcatcgagatactgctgattatactgccgcagaccggaaaataattcttgttgatcgttgggattaatgctttttgtaatgattagtgtcattaactatctccagtatcgcgctgccgaatggttattttccctctccactttcacaaaatattcttattttctccatgattatttgccttaattttttgcgttctaaaagtaagcaaaaaaacctttccattatcgcgacggatcgtataatggggaaaaatgagaatgatcattctcaccacaaaaccagaggagatgcgcttttcacctcctgaagaccgaagaggttggcttcagcggagacacaataacaatcacgttcaggaacatctgtgttccttttttgtcattttcgctcacccgaaaatgcctcagcgcccaacctattccctcgtttttaaataaacggggcggacgtcttatatcttgagaaaatataatgaaatacatcatagctcccatcgcgacagcattatttctccttagcggatgcgataatgcgcagacatctgctccgcagcaacccacgccggaagtgggcgtggtcaccctgcaaagccagccggtgccggtagtcagccagctcaccggccgcaccaccgcctcgctcagcgccgaagttcgcccgcaggtgggcggcatcatccagaaacgcctgtttaccgaaggcgatatggtgaaggccgggcaggccctttaccagatcgatccctccagctatcgcgcgacctggaacgaagcggcggcggcgctgaaacaggcccaggcgctggtggcctccgattgccagaaggcccagcgctacgcgtcgctggtcagggataacggcgtttcccgccaggatgctgacgacgccgcctccacctgcgcccaggacaaggccagcgtggaatcgaagaaagcggcgctggagagcgcgcgcattaacctgaactggaccaccgtcaccgcgccgattgccgggcgcatcggcatctcgtcggttacgccgggggcgctggtctccgccgatcaggataccgcgctggcgacgatccgcgggctcgacaccatgtatgttgatctgacgcgatccagcgtcgatctcctgcgtttacgcaagcaaagcctggccagcaacagcgacaccctcagcgtgacgttaaccctggaagatggcagtacctatcccgaaaaagggcgtctggcgctcaccgaagtcgccgtcgatgaatctaccggctcggtgaccctgcgcgctatcttccccaacccgcagcacgtcctgctgccggggatgttcgtccgcgcgcgcatcgatgaaggcatcatgaacgacgcgatcctcgccccgcagcaggggatcacccgcgatgccaaaggcgacgccacggcgctggtggtcgatgccgccaacaaagttgagcagcgtaccgtggaaaccggcgacacctacggcgataaatggctggtgctgagcggcctgaaagcgggcgacaagctgattgtcgaaggcaccggtaaagtggcccccggacagacagtgaaggccgtcgccgtcaacaataacggaggcaacgcctgatgttctcccgtttcttcgtgcgtcgcccggtctttgcctgggtgatcgccattctgattatgctcgccggggtgctggcgatccgcacgctgccggtaggccagtacccggacgtcgccccgccggcggtgaaaatctccgccacctataccggggcgtccgccgaaaccctggagaacagcgtcacccaggtcatcgagcagcagctcaccggcctcgaccatctgctctacttcagctccaccagcagctccgacggctcggtcagcatcaccgtcacctttgagcaggggaccgacccggacaccgcccaggtgcaggtgcaaaacaaagtgcagcaggcggaatcgcggctgccgagcgaagtccagcagtccggcgtaacggtggaaaaatcgcagagcagctttctgctgatcctcgcggtgtatgacaaaaccaaccgcgccaccagctccgatatctccgactggctggtcagcaatatgcaggacccgctggcgcgcgtggagggcgtcggcagcctgcaggtattcggcgccgaatacgcgatgcgcgtctggatggacccgaccaaactcgcctcctactcgctgatgccttccgacgttcagtcggcgattgaggcgcagaacgtgcaggtttccgccggtaaaatcggcgcgctaccgtcgtccaatgcccagcaattaaccgccaccgtgcgcgcgcagtcccggctgcaaacccctgaccagttcaaagcgatcatcgtgaaaagccaggccgacggctcggtggtgcgcctgagcgatgtcgcgcgggtggagatgggtagcgaggattacaccgccaccgccaatctgaacggccacccggccgccgggatcgcggtgatgatggcccccggcgccaacgcgctggacaccgcgacgctggtgaaaagcaaaatcgccgaattccagcgtcagatgccgcagggttacgatattgcctatccgaaggacagcaccgagttcatcaaaatctcggtcgaggacgtgattcagaccctgttcgaagcgattatcctcgtcgtctgcgtgatgtatctgttcctgcagaacttccgcgcgacgctcattccggcggtggcggtgccggtggtgctgcttggcaccttcggcgtgctggcgctgttcggctactcgattaacaccctgacgctgttcgccatggtgctagcgatcggcctgctggtggatgacgccatcgtggtggtggagaacgtggagcgcattatgcgcgacgaagggctccccgctcgcgaagccaccgaaaaatcgatgggcgaaatctccggcgcgctggtggcgattgccctggtgctgtcggcggtgttcctgccgatggccttcttcggcggttcgaccggggtcatctatcgccagttctcggtaaccattatctcggcgatgatgctgtcggtggtggtagcgctgaccctcaccccggcgctgtgcggcgcgctgctcagccactccaaaccgcacaccaaagggttcttcggcgcctttaaccgcctgtgggggcgcacggaggcaggctaccagcgccgggtgctcggcggcctgcgccggggcgcagtgatgatgggcgcttacgcgctgatttgcggggcgatggcgctggcgatgtggaagctgccgggcagcttcctgccggtggaggaccagggggagatcatggtccagtacaccctgcccgccggggcgacggcggtgcgtaccgccgaggtgcgccgccaggtgaccgactggttcctcaccaaagagaaagccaataccgatgtcattttcaccgtcgacggcttcagctttagcggcagcgggcagaacgccgggatggccttcgtgtcgctgaaaaactggtcgcagcgcaaaggggacgacaacaccgcccaggccatcgccctgcgcgccaccaaagagctggggacgatccgcgacgccaccctcttcgccatgaccccgccgtcggtagacggtctcgggcagagcaacggcttcaccttcgaactgatggccagcggcggtaccgaccgtgacagcctgatgaagctgcgcagccagctgctggcggcggccaaccagagcagcgaactgcagtcggtgcgcgctaacgacctgccgcagatgccgcagctgcaggtggatatcgataacaacaaagccgtctcgctggggctgtcgctgagcgacgtgaccgatacgctctccagcgcctggggcggtacctacgtgaatgactttatcgatcgcggccgggtgaagaaggtctatatccagggcgaaagcgacgcgcgcgcggtgccgtcggacctcggcaaatggttcgttcgcggcagcgataacagcatgacgccgttctccgccttcgccaccacccactggcaatacggcccggaaagcctggtgcgctacaacggctccgccgcctttgagatccagggcgaaaacgccgccggcttcagctccggcgcggcgatggacaagatggaaaagctggccgacagcctgccggcgggctccacctgggcgtggagcggcatttcgctgcaggaaaagctggccagcggccaggcgatgagcctgtacgccatctcgattctggtggtgttcctgtgcctggcggcgctgtatgagagctggtcggtgccgttctcggtgatcatggtcatcccgctcggcctgcttggcgcggcgctggcggcgacgctgcgcggcttaagcaacgacgtctacttccaggtggcgctgctgaccaccatcggcctgtcgtcgaaaaacgccatcctgatcgtggagttcgctgaatccgccgtggatgaggggtattcgctctcccgggcggcgatccgcgccgcgcagactcgtctgcgcccgattgtcatgacctcgctggcgtttatcgccggggtgctgccgctggccatcgccaccggcgccggagccaacagccgcgtggcgatcggcaccgggattatcggcggcaccctgacggccaccctgctggcggtgttcttcgtaccgctgttcttcgtgctggtgaaacgtctcttcacccgccaacgtccttctcaggagtaaggtatgtttcgtttaagttttatgtttatcgcgctcctgaccgcgggctgcgtctcgcttgacccgcattatgatcgcccggccgcgccggtgccggccaccctgcccggggcgcacggcgaatcgacggcggtggtcggcgactggcagaaagtggtcaatgacgcgcggctgaaaaaagtggtcagcatcgcgcttaacagcaaccgcgatgtgcaaaaggcgctggccgatatcgaggccgcgcgcgcccagtatggcgaaacgcgggcatcgctgtttcccaccgttgatgccgaactgagccacacccgcagcaaaacggtggccagcggcctgagttccgcttcgcaggccgacggcgcggtctccagcttcgaactggacttgttcggcaagaaccagagcctgtcgcgcgcggcgcgcgaaacctggcttgccagcgaattcaccgcgcagaatacccggctgacgatgattgccgatttgaccaccgcctgggtgacgctggcgacggataacagcaatctggcgctggcgcagcagaccatggacagcgcggcaaactcgcgcaacatcgtcgcccgccagatggcggttggcaccgcctcagccggcgatgtaagctcggcggaaagcgtctatcagcaggcgcgcgccagcgtcaccagctatcgcacgctggtggcgcaggataaaaacgccattaacctgctggcgggggaaaccgtgccggagagcctgctgcccggcactctcgagagtctcggggataacagcatcgcgctggtgccggcgggcgtgtcgtcgtcggtgctgctgcgtcggccggacattcaggaagcggagcacaatttgaagagcgccaatgccgatatcggcgcggcgcgggcgaacttcttcccgtcgatttccctgaccgccagcgccggggtcggcagcgactcgctgtcgtcgctgttcagccacgggatgcaggtgtggtcgttcgccccctccatcagcctgccgctgttcaccggcggcagcaacctgtcgcagctgcgctatgcggaagcggagaaaaaggggctgatcgccacctacgagaaatcgattcagagcgcgtttaaggacgttgccgatgcgctggcgcgccgggaaacgctgagcgaagagcttgatgctcagcggcagtatgtcgccgccgagcagacatcgctggatatcgccatgaagagctatcaggccggggtcggcgattatctgtcggtgctcaccgctcagcgcacgctgtggtcggcgaaaacgacgctgctgtccctgcagcagaccgacctcaataaccggatcaccctctggcagtcgctgggcggcggcgccagttaaacttacccgccgggcgaccgagcccggcctctacaaggaatcgttatggcacgtgtttccctctcctgggcgctgatcctcggcctgctgtcgggtatcggcccgctgtgcacggatttttatctgccggcgctgccggagatcactcagcagctgcaggccaccagcacccagacccagctgtcgttgaccgccgcgctgattggtctcggcctgggtcagctgtttttcggcccgctgagcgaccgcattggccgcctgaaaccgctggcgctgtctctgctgctgtttatcttctcttcggcgatgtgcgccctgacccgcgatatcaacatgctgattgtctggcgctttttacaaggctttgccggcgccggcggctcggtgctgtcgcgatccatcgcccgcgataaataccagggcaccctgctgacccagtttttcgccctgctgatgaccgtgaacggcattgcgccggtgctgtccccggtgctgggcggctacgttatcaccgccttcgactggcgaattctcttctggacgatggccgccattggcggcgtgctgctggtgatgagcctggcgatcctgcgggaaacgcgcccggccacagcggcgcatgccagccgccaacggcccggccagccggtgctgaaaaatcgccgctttctgcgcttctgcctgatccaggcctttatgatggccgggctgttctcctacatcggctcttcttccttcgtgatgcagagcgaatacggcatgagcgccatgcagttcagtctgctgttcggtctgaacggtatcgggctgatcatcgccgcgatgatcttttcccgtctggcgcgccgctttagcgccgaaagcctgctgcgcggcggcctgacgctggcggtgagctgtgcggcgatcatgctgctgtttgcctggctgcatctgccggtgctggcgctggtcggcctgttctttaccgtgtcgctgatgagcggcatcagcaccgtcgccggcgcggaggcgatgagcgcggtcgacgccgcgcagtccgggaccgcgtccgcgctgatgggcaccctgatgtttgtcttcggcggcatcgccgcgccgctggcgggtctcggcggcgaaacaatgctgaaaatgagcctcgcgatggccatctgctacctgctggcgctgctgctgggcctcagcaaaccgcgcgacgcacgctaatctcctgctgcggtaataaaatattccagatttattaccgcactatttcccgccatacctaccattctcctattattctccacgtactaatcgtgatactcttcacaggcaaggaataaataattccttatactgcgcgccactgagaataacgaggtttctatgagtatcgacctgagcaaactgctgaccgagcgacgtaacgccaacagcgccaacattgacaccctctccaccctcgagatgctgacggtgataaaccaggaagaccagcaggtagcccaggcgataacgccctatctgccgcagattgccgaggtggtggataaggtcgcggcagcgctgcaggccggtggccgcttgatttacattggcgcgggtacctcagggcgtctggggatcctcgatgccagcgaatgcccaccgaccttcggcacccgcccggagcaggtggtggggatcatcgccggcggacataaagcgattctcagcgccgtggaaaacgtggaagacaacaaagcgcagggggcgatggatctgcagaacctgaacttcagcaaccgcgatgtgctggtggggctggcggccagcggacgcacgccgtacgtcattggcgccatggaatacgcccatagtcagaatgcctttgtcgccatcgtcagctgtaacccgcatggcgaaatggcccagctggcggacgtggcgatcaccccggtggtcggcccggaagtggtcactggctctacccgcctgaaagccggcaccgcgcagaagctggtgctgaacatgatctccaccggggcgatgatccgcgtcggcaaggtgtacagcaacctgatggtcgacgtcgaagcgaccaacgccaagctgattgagcgccaggtctctatcgtgatggaggctaccgactgcgatcgcgccaccgcccagaaggcgctggaggcctgcggccgccactgtaaaacggcgatcgtgatggtgctggcggacttaagcgccgcagaggcgcagtcgctgctggcgaaaaacaacggctatatccgcaaggcgctcagcaacacctgagcgccgacagacaggtaacgggcaatggcaaaaataacgaaagagatgatagcgcggatcctcgcccacgtgggcggcgccgcaaacgtcgcgcaggcgggcaactgcatgacgcgcctgcgcttgaccctgcgcgatgaaagtctggccgacagcgccgccatccgccagattgacggcgtgatgggggtgatcgtcagcgacgagcagttccaggtggtgctcggccccggcaaggcgcaaaccgccgccgaaatgatgaacggcctgctggaggcagcgcccgccgccgcgccgacgctggccgacgtcgcggcggagaaaaagcaggcgctgaagggcaagcagaccagcgcggtgcagaagtttctcgccaaattcgccaccatctttacgccgctgatccccggctttatcgccgttgggctgctgctgggcttcgccaccctggcggaacaggttttcgtactggagaacgcccatccgaacgccagcctggtggcgctgattggctatatgaaggtcttcagcaaagggatgttcacctttctgagtatcctgattggctataacgcgcagaaggcgttcggcggctccggcgtgaacggcgcgattatcgcctcgctgttcgtgctgggctacaacccggaggcaaccagcggcttctacgccggcatttccaccttcttcggccatggcatcgatccgcgcggcaatatcatcggcgtactgatcgccgctatccttggcgcgtgggttgaacgccaggtgcggcgggtgatgccggccaacctcgatatgatcctcacttcggcggtgacgctgctgatcatgggcgcggtgacctttacggtgatcatgccgattggcggctggttgtttaccggcatgtcgtggctgttcctgcatcttaacggcaacccgtttggctcggcggtgctggccggcctgttcctgctggcggtgatgttcggcgtccatcaggggtttgtcccggtctattttgcgctggtggacgcccagggctttaactcgctgttcccgatcctggcgatggccggggccgggcaggtgggggcggcgctggcgctgttctggcgggcgaagcgcgattcgctgctgcgaacccagattaaaggggcgattattccgggcttcctcgggattggcgagccgctgatctacggcgtcaccctgccgcggatgaagccgtttgtcaccgcctgcctcggcggcgcctgcggcgggttcttcgtcggactgatcgcctggctggggctgccggtcggcctgaacacggtgttcggtccgtccggtctggtggcgctgccgctgatgacctccggcagcggaatttacgccgggatggcggtctacgccggcgggctggcggtctcctacctgtgcggttttgtcctcacctggctgttcggcagtaaaaatgtcgatttaagctagaacgcgactatcggttaatgcccggcggcggcttcgccttaccgggcctgcaaaatagttacgccgccgcgcccgactaccatttcctgccccgccgcccgggcgcgcgcatgctatgattcccctttgtcatatttcgcttgaggaaaagatgggctccagcaaaaaagggatgctgaacgtactgattgccgccgtgctgtggggcagttccggggtgtgtgcgcaatttattatgcaggaaagccagatgtcgtcgccgtttctgaccatgacgcgtctgctgttcgccgggctgatcctgctgatgctcggctttgttcacggcgaccgcattttccgcgtgctgcaaaaccgccgcgacgccctcagcctgctgtttttctcgctgtttggcgcgctaaccgtgcagttcacctttctgatgaccattgaaaagtccaatgccgccacggccacggtgctgcagtttctgtcgccgacgatcatcgtcgcctggttcgccctcgcccgcaaagcgcgtcccactccgctggtgctgggggctatctgcacctcgctggcgggcacctttctgctggtgacccacggcaacccaacgacgctgtcgatttcgccggcggcgctgttctgggggatcgcctcggcgtttgccgccgccttttataccacctatccttcaacgctgattgcccgctacgggacgctgcccatcgtcggctggagcatgctgttcggcggcgcgatgctattgccgttttacggcggccagggcaccgattttgtggttaacggcagcctgctgttagcttttttctacctggtggtgatcggtacttcgctgaccttcagcctctatctcaacggcgcgcagaagattggcggcgcaaaggccgggatcctaagctgcgccgaaccgctgagcagcgccctgctgtcgctcctgctgctggggatcaccttcacgctgccggactggctgggcactctgctgatcctcgcgtcggtggtgctgatcgccatcgactcgcggcggcgggtgagagccgcctgagcaggcgataaaaagcgcattttcaataagttaaactgaccactatttgcgtgttttcccgcctgcgcatatagttgacggaagcgattacggaaggagaagcctgatgaaagcatgttggatggtatgcctggtcaccgccctgagcgccacgtcggcgtgggccgaatcaccgctgcaaagcctgcagttcgagcagcaaaaacagcaggtgctcaaagcggtgaaggaaaaatgcgcgccagcaagccacctcagcgacaacgattttgccaataaagtgctggcgaccgacggtaacaagaacgcggtccgcgaagcaacgctggcgaaggagcgcaataaccagaaaagctaccaagccgcaatcgacaaaatcgtctgtccggccaaatagcggttatttcagcctcgcgaccagcgttttccagtcaaacggcgtaagctgcctgtagctcaggctacgggcggccatctgctccggcagctggcgctggcttttcgcgatcgcctcgctcattatcccggcgctccccacgtcacgcagggttttcaccacctcttccatctcttcgctgcgccgaatgccatgttccgccacccggctgatcagatagtcggggaacgcgcctgtccagcccagagaggggaaactatgatgcaaggagctaagcacctcctcctcaacgccgtattcacgagccgcgaacaggcattctgtggtaagcgcttcaagacctttgatcatcacgctacggcacatttttatcgccgacacctggcccaccgtactggcgccatagcgggcattcagccccagcccctgcagacgcggcgcgatcgcctccgcctgcggcccgccgatcaataacggtgtctgcaatcgggccggcggtaccggcgccatcaccgcgacatcgatgtaggcgcccggcagaaaatgttcagccgcctgccgtttcgtctccggcgccacggagttgagatcgaggaaatattgtcccggctgcagcagcgcggccgcctgctgcgccacctttagcgcctcaccggcggtcacagtagaaaaaaccagcgtggccccctccagcgcctgcgccagcgaatttcccacctgaacgcgcgaatcacgggctttcctgagcattgcctctcgctccgggccattgagcttgcaatcccacatggtcaccgcatgctcacgggccagatccgccgccagaatgccacccgcctcgccaaaaccaataaacgcgattgtcatcatcactcctcacgcggccagacgcgggccggaataaaaacctcgccagcaaacagcagtcgcgctgtgcgtaacaggccgcagccagccagggcgccgtcagcatcaagctgaagcgtcacgctaaattcgcctgtcggatgctcgacgctgagcagcggcgtatcgcctggcgctacctgcgccaggccctgcgcgacagagccggggagcagacaagcgctggccacgctcaccgcgccaaatacgccgatcgacgcgtggcagcggtgggggataaaggtgcggctgctgatggcgccgccgtgtcgcggctcggcgatcagggtcatcttgggcaccgtgcgctggctgacgtcgccaagctgcatcagcggcccggcctgcaggcgaatcgactccaggcgacgtttaagcgcgtcgtcattatccagctgttcgcgcgtctcatagccggtgcaaccgaggtcgcacgcgcgcagcaggatcaccggcataccgttatcgatgcaggtcacctcgacgccgtcaaaacgatcacgaacccggccggtcggcagcagggccccgcagctggagccggcgacatcaagaaaatggagcaggatcgggctggcgctgcccggcacgccatcgatacgactctcgccgacgtagtcgaccccgtcggcatcgcaggggatctctgccaccgccagttgccccgtgttctccataaaaatacgcacccgagtgagcggcgcatcgtagcgaaccagaccgcgctcgatggcgaaagggccaacggcggcgagaatattgccgcagttttggccataatccacggtagccgccgccacgttcacctgggcaaacagatagtccacatcggcgtcaggccgtgcggagcggcggataatcgccactttgctggtcagcggatcggcgccgccgatcccgtcaatttgccggggatcaggcgagcccatcaccgccagcagcaccgcatcacgtcgcaccggatcggcaggcagatcgtcggccagaaaacaggccgctttagaggtgccgccacgcatccatagacaggggattccgcgttgcgccatttattcctccacctcgtctgcgcggtcgtaataccgcaggcccttttccgccagacgcggacgcatagcgtaaatatccagccccagctcgccattgcgcatccgctcacgcttcgcaagctcattgctcatgcgggcttccgctttatggagcacatcacggacccgggcgtgaggcagcaccacgacgccatcgtcgtcggccactacgacatcgcccggctgtacaagctgacctgcgcatatcaccgggacgttaaccgaaccgaggctctctttcaccgtcccctgggcataaacctgacgggaccagacggcgaatcccatttcccgcaacgtttgcgaatcacgaatgccgatatcgcccaccagcccgaccacgccgcgcgattggagagacgtcgccagtagatcgccgaagaagccatcgccgcacggcgaggtcggggccaccaccagaatatcgccggcgcggcactgctcgaccgccacatgaaacatccagttgtcgccaggcgtcaccagcacggttaccgcgttgcccgcccggctgacgccctgctgaatcggacggattgccggccccatcagcccctgacgatcccaggcttcatggagcgtcgccaccccggccgcctcacagcggcgcaaaaccgcctcgtcatgacgcggcagatggcggatcacaaggccttttttatttatcaggttcatgccaggttctccgttacgcgggggaagatgctctggaaggcttcgccgtgaacgatatcgcgcgcggccgtgatgccgatattgcgcttggcctgcaccccgcgctgcagcgccacgcgggtgtagtattcccacagatgctcctgaccctgcatgcactgaatggcctgatactttttctcccagacggcggtgatgtccagtaacacatcgggtttccagttgcactgctccggctggtgcggttcgaaacagtaaaccgggggagcagcgacaattttctcaccggggcgatagccctctgcctgggcgataatccgtgcttcctgcgccagatgggaggccagcggatgatcgtagttatagggatcgtgcagggagtgcgtcaggacaaagtggggctggatacggcgatacacatccgccagacgaaatagcgtctctttatcggcgcgcagcggatagtcaccgatatcaaagaattcgacgctggcgcccaggatcgcggcggcggcctgcgcctcttcgcgacgcacctgcttcaccgcctcctcggtcatgttgcctttacgccacagtttggcggactcgccgcgctcgccaaaggataaacagaccacatggacctgatagccctgcagggcatgcagcgctatcgcaccgcccgcgcgccagacgaaatcggccgagtgggcgctgacgacaagggcacttttttcgctaaccggatgagacatgatggcttcctctgttgtttttttcagcttgtcatgtcccgtcgtggggaggtaattcgttaacttgcgaaggctatgatttttatttatgttgtcgtctcactcactttttcaggcctgacgaacaatgctaaagagaaagcacgataaaattataaatatcatgcagctgcgctttttctgtcaggtcgcgctgcgcggtagcgtctcacgcgcggccgatgacttattccgcacgcagtcagcgataacccgggctattcgcgatcttgaagccgcgttgaacgtcacgctgttcgaacgccattacagcggcatggtgcccaccgagtatggtaagtgcatcctgccgcgcgcccggcgggcgattgacgacctgcaggccattccggcgctgctgcagaagcaccatacccgcagcagcggcccgctggcggacgccggctggctgttcaatacccgccgcttagccatttttattcagctctatcacgtcaaccatacccaaaccgtcgcgcaacagttggggatcactcagccggcggtcagtgccgcgcttaaggtcctggaaaaaggagcggattcggcgctatttcgccggacgccagagggggtgcgtcccacgcctgccgcggagctactctatcccccggtgagcagagcgctcaacgagctggaaaacatctggagcgatctcgctgcccgtcgcggggtgctggagggcaccgtgcgcattggcgccctgccgctgagccggacccggctactgccctccgccatcgccgcctttctggcccagcacccgggcatcaccctcatgaccaatgaaagcccgtatgagtcgctggtcgccgatatgcgggcaggtaatatcgattttattatcggcgccctgcgccaggatgaagatcttccggacctctgtagcgaagcgttattcgaagaggatatgttgattttactgcgtaataaccacccgctgctgcgccatccggacccgcgcagccagctggcgacagcgcaatgggtgctgccgcgcgccaacgcgccggcgcgcaatttgctggataaggcgtttgtcaccctggggctgccgctgccccagccgacggtggagaccggggatgcggcgatggtgcgaggattgctgcagggctccgacatgctggcggcggtctccgccagccagatgcgttttgaaactgacaatgggctgctcagcgtgttgccggttcccctgcccgataccacccggcgtatcgggctgacgtttcgcgccggcagcctgccctccccggcgacgcaggcgctgttgcgttttatttatcagcaggttcaggacggggccgtttaacgtttacccgccaccgaataggttacctgctggttgcgcgtttgctgaaacgcctccagcgtctgcccgcgcatcgcggcgtaaatatgcaggttggatacgccgaccaccgcgcccattttctccagcaggaagaagctggcgccatattgaattaatccccgccagtcgcgcgcgttgagcaactgctgttcctcctcactcagtccggcttcggcataaagcgactgaggcgactgcagaaaacgttcacgccaggcaggctcaatcagccgatgcaggaaacggttaagccgcaagccattcaggctgcgctcgtgggtaaaaggataggttcccggcagtttctccaccccggccagctgctgcgccatatgctggcgatggcgcgtcagggtatcgacggggggcaggcgcgcattgttctcaaggatcagcgtggcgataccggtcatcgagggcaggtaatagtcgcgccaggtttcggtgacattggctgatagcgcgccgcgcatcaccagccacatgattacttcggacccctccatcccccccagctcggcatattcgccaagggtcatttcggtaagcttttccgggtcattaaccagcatatcaacaaactgggcatcccagtcgggattattaaatccgcagcgctcgccatgaacctgatgcgagagcccgccggtcgcgacaatcgccacattgatatcttccgggaagctttcaatcgcccggcgcagcgcctggccgagtttgtaacaacggcgcgcgcttggtaccggaaattgcagcacgccgatctgtaacgggatcaccgccgtcggccacccctgcgcttcatcccagggcaacagcgccgaaagcggcgagaaaaggccgtggtcgagctttttatccataaagaacgacatatcaaactcgtcggccatcaggctggcgccaatgtgccttgagagcgccgcgttgccctggaccggcggcaggcagcgcggtccgcctccctcatcggcaacgtcatattgactatcgattcccagcgtaaaagtcgaatagtgatcgaagaaaaaggcggtcacatggtcattaaagatgtataccagcgcatccggttttttctcctccagccagcgctgcagcggttcgaagctctggaagatcggcgcccacgccggatcctgctgtttatgatgatcgaccgcgaagccgatagtcggggtatgagagacggcgataccgccgagaatgttagccatcagataactccacttatcggtgttcgaggggggatgacaaagcgtcaagttctgcctctgtgagtcgaggcttagcgtgattcatacggtgcaacaaaatacagatccccgccaggcaggccggcagcgcaagcaccaaaaagatcgacgagtgtcccggcacggccagcatcagcatcccgcccagcgtggagctgaggatagccccggtacggccgataccatgcatccagctgacgccggtagcgcggatctcggtttgataataggcgggcgaataggcctgcagaccgttctgcgcgccgttaatgcacatcccgctgataaaaatcagcaccgacagcgccgccgaaccgaaatccatcaccccctgggacaacaggcacagacagccgaggaaataggttgccgcaatcacggctttcgccgaagcgcgatccatcagcataccgacaaggatcccgcccagcgggccgccgagctggaacaagccggtcatcatcgccgcctgctgcagcgacaggccgccggagcggagaatggttggcagccagccgttcagcaggtaaatcacgaacagccccataaaataggttaaccacagcgctatcgtgccgcgggcatagccatgccggaacagctgcgccactttgctgctccgcgtgatgggcggcgcattcagctggaaaacggtttcagccgtaaactggcccccaagccggttaagcgccctggcgatctgctcgcccggtagtcggcgcgccaccatgttcatcgccgactctggcaacatcacgatcataaaggggagcaccacgagcggcagcacgccgccaaaaaccagcgccgagtgccagctgtaatgcgataacaaaccggcggcgataaagccgccgaggccggaacccacgttaaaaccgctgtacatcagggtgatcatcacccctttacgccgctccggcatatattccgccaccagcgtgacgcagttgggcattacggcgccaaggccaaggccggtgagaaaacgcatcagcgccaactgcgtcgggctttgcgccacggcgccggccaggctgaacagcgcaaacagcgccaccgaccagagtaaaattcgctttcggccgtagcggtcagaaagcggacccgctaccagggcgccaatggcgacgccgaacatggccgccccaagaatcggccccatttcggcccggctgatgccccagtcttcgatgagcgccggggcgacaaagcccatcaccgcggcgtcatacccatccagcataatgatgatgaaacagagcagcagcacgttccattgaaagcgcgagaccgggcgggtatctatccacgctttcacatcgacaacgttcgtgtgattcatagggtgacttcctcaagcaggcggtacgaatgttctggttagtgttttttgagtggaactttcgtactcaacttaaggcaggtcacgcaggctgtccggttcgaaaatccggcgtcagatatgagttttatttataatgtgagggatacgacaaaaaccagccagcaaaaaacccgcagccaacggcggcgggtcagggcaagagcagcgtttagtgcttcggaataattaaatcgccgcgcagcgggctgccgcccgggttgtccgttttctcggtcagccagttgacgatccgcgatgccatcgcgtccatggaatattcaatcgccgggatagtcgggataccgggcagctgtaacgatccggcgaggctaaacaccatgacattttgcggaacggcgcggttaaacgcctgcagctgcggcaccacgcgctgcgcctgctgttcatcgctcaccagcagcgcgttaaagttcagcgtcgtggcgttattgaccagctcctgcaccgccaccgacggcgaggtattatccagaaacaccaggttgcgattaaacggcaaaaagtttttttccagcgcgtgcttgtagcccagcagcacctggtcggcaaagccgctgctctgcggatgaatcagcgcaatctgccgtctcccctggctaatcagatagtgacaggcggtttcggcggcgaaagcatgatcgaactgaatactgttgtcgccttcgctatcgaggcagtccaccagcaccacgtccgggcggttaatattcagaggaaaacgcgcgccgatgattagcacgttatcgcacagcccgcaggtcaactcctccagagagttcatcacgccgtggctggtgttggcgaagcgcagcagcaggtgtttctggtgctggctgagctgtttttccagggcgtagagatagctggtggtttggttgatgttgtcctgggcgcagatgacgccgatgcagccggtggactggctgagcaacgactgggctatcatgtttggccggtaattgagcgcttccgccgcctgcagcaccgcctgacgactggcttccttcacgccacgtgagccgctcaacactcgcgacaccgtggctttggaaaccccggcaagtcgtgaaacatcattgattgtcgacatcattttcccctgcgcgggcgccgcgtcccgccaaaatcctgtaaacctgaatcgcttcaattatgaccagcgcagtatatccatttcgccatttgtttggaaaccgattttccatttcagcgcaaaacatcgccaaatcgacagaataatgtgagcgaaatccaataaatccgccctataagcaggagatcttgaccactatcacagttctgctttttataaatggaaaccggtttccgtctgatatcaaatcacccacgcaataactttttacattttgaggatggtcgtcgatgtacaagattatgctgtgctgctctgtcgggatgtccaccagtctgctggtcagaaagatggttgaggcggcgaatgaacgtgacctgccggtgcagattgacgcctatggcgtttccgaatttgacatgcagtttccgcagtatcaggtggtgttgcttggcccccaggtgaaatacatgttgaaaaccctgtctgacaaagcggcttccctgaacattcccgttcagcccatcgatacgatggactacggtatgcagcggggagacaacgtcctgaattatgctctgtcgctgatcccagcggcgcactgagaggtgttgaaatgagttctctgtatcagtccatgattgccgtgatcgagcaatctattactccgctggcaggacgccttgggcagcagaaatacgttatcgctatccgcgatggcttcactgccgccttgccgtttatgatcatcggctctttcatgctggtatttatctttccgccgttttcacccgataccaccaacggctttgcccgcggctggcttgatttctcccagcactaccgcgaacagctgatgctgccgtttaacctcagcatgggcgtgatgaccttctttatctcggtcggcattggcgccagcctcggtcgtcagtttcagctcgatccggtgatgtccggtctgctggcgtttatggctttcctgctggtcgccgcaccctatgccgatggcaaaatttccactcagtatctgtccggtcagggcattttcaccgcgctgatcaccgccatctactccacccgcgtttacgcgtggctgaagcaaaacaacattacgattcgtctgccgaaagaggtccccaccggcgtcgcccgttcgtttgaaatcctgatcccggtgctggtggttattgcgactctgcatccgctgaatctgtttatcgaagcgcagaccgggatgatcctgccgcaggcgatcatgcatctgctggagccgctggtttccgcctccgactcgctgccggcgattttgctctctgttctgatgtgccagattttctggttcgccggtatccacggctcgctgattgttaccggcattatgaacccgttctggatggccaacctgtcggcaaaccaggcggcgctggcggctggcacggtactgccgcacgtctacctgcaaggcttctgggatcactatctgctgattggcggcgtcggttctaccctgccgctggccttcctgctgctgcgtagccgggccacccatctgcgcaccatcggcaagatgggcatcgtgccgagcttctttaatatcaacgagccgattctgttcggggcgccgatcatcatgaacccgatgatgtttatccccttcgtctgcgtaccgatggtcaacgcggtgctggcttacggcgcgacgcgtcttggctggctgagccaggtggtgtcgctgacgccgtggactacgccggccccaattggcgcgtcgtgggcggctaactggaccctgagcccggtggtgatgtgtctcatctgcatggtgatgtcggcggtcatttatctgccgttcctgcgcgcttatgaacgttccttaatgaaaaccgaagttgagaaagccaaaaatagcgttccggtagcagaaaccgttagctaatccctctccttccggagagataataagatgacagcgtaataatgcagaaaatgggctttcactgcattattaaataataaatacctcaggaatacacatgattgaattagaagatgcggtaatggaaattatcgttaatgcgggacagtcacgctcattatgttttgaagcgctgcatgcggcccgaaccggaaatatcgacgaagcgcgtttactcttaaacgaggccgacggctacgcccgccgggcgcatcagatgcagacccagctcatcgggcaggatgccggtgaagcgcgtcagcccatgacgctgattatggtacatgcccaggatcatttgatgaattcgctgctggcccgcgagttctcagaagaattaatccatctgtaccagcgttaattaatatggaataacgttagcgagaatattattctccggcgtcgctgtaccctaaaaaacaaatcagcttattttggctatttattctagccagaatgggatggttattatctgaaatatattaattattaaagcgagataaccatgaatactgtaaaaaaactgcctttagccatggcggtggtcgccgcgctgtgcccaatttctgtcatggcgcaagaatttacgcaggaacagatcgacgccatcgtcgccaaagccgttgataaagcgctggccgaccgccaggcaaaaatcgacgccgcggccaacaaaaaggtcgacgtgattactaacccggaaaccaccgccgcctcgccggatatggccattccgttcggcctcaagttcagcggctacgcccgctatggcgcccacttccagaccggcgaccagaaatatgtcggcgtcgacggctcctataacggcgcctcggcgatcggccgtctgggcaacgaaagcaacggcggcgaattccagatcagcaaggccttcaaaagcgcgcagggggctatctgggatctcaacgtgatgttcgaccactggagcgacgaagttaacctgaagaaggcctacgtcggcgttaccaacgtgctggaatccaaccccaacgcctatctgtgggccggccgcgacttccaccagcgtccgcaacaggggatcaacgactacttctggatgaaccacgacggccagggcgccggggtgaagaactttgatatcggcggcgtgcagttcgacgtggcggcggtgtcgcaggtgaaatcctgtagtccggaagtgatggccgacgagaccaacccgtcgcgcatcacctgtaccggcagctccgacaccggcgacaacggccactacgcgctgaccaccaaaacccacaacatcaaggccgggccgatcgacgtcgaggtgtacgccaactacggctttgactcaaaggcggtggacagcgacgcgcgtctcgaagcctggcagggcggcctggtgctgagccacaccaacgacagcggggtgaacaaggtgatcctgcgctactccgacaactcggataacagcgtctacaacaagaccgacgacctgaccacggtctacgccagcttcgagggcagccataagttcacccagcaggcgcaggtggaatatctgctggccttccacgactacgacaacggcaaggataataccgacaaccgtaaaaactacggcgccatcgtccggccgatgtatttctggaacgatgtgcactccacctggctggaagcgggctaccagcgcgtggattacgaccagggcggggataaccacggctggaagctgacgctgtcgcagaacatcgccatcggcatggggccggagttccgtccgatgctgcgcttctacgtgaccggcggccaagtggataacgagcacaccgcgaaggtaaacggcacccaggaccagcagctggattcgctgaacgtcggcgggatgtttgaggcgtggttctgatgcgatagcgttgtcgaaggagcgttcccggctggcgctacgcttagccgggctacaactgaggaggcctgcgggattccacccccaggcccgcgcaagcgcagcgccgccgggcggtcaggcaccgtacccgcggttgtgccggatggcggcatacatgccttatccggcctacgttcctgaggaagcctgcgggaccccaccccgtaggcccggcaagcgcagcgccgccgggcggtcaggcgctgtacccgcggctgtgccggatggcggcatacatgccttatccggcctacagaaaatcgccttccccccaggaccggcaagcaacagctccgccgggcagtcagccccgtgccctggtggcgtcatcaattctttatctctggcttaatcggcgggcgatacgctcaagcttcatcatcaacagcagcgtgacgcccaccagcacaatggtcagcgccgagccatcggcgatattgccgcgatcggtgaggctgaaaatggtcaccggcagcgtcgtccagcccggcggatacatcatcaccgtcgcccctagctctcccatcgacaacgacaggctcagcgccagcgccgagatcatccacggcgtcatcagcggcagcgtcacatggcgcaggcgataccacggcgaagcgcccaggctggaggcgacgttttcaatatcagcggaaatacgcgccagcccggtcgttacgttgctgaaggtaaaggcggagatcagcacgaagtgcgccgccagaacgataaagaaggtgccgttcatctgcagcggcccctagctgaacgccaccagaatgcccagcccgacggaaaccgaggggatggcgctgggcagataaaacgccaggccaagatatttctgtagcgtcgcgccatgctggcgcagcgccagcgccgcccacatcccgcacagcagcgccagcaggctggcgcagaagcccaccatcaggctcgaaaacagcgaatcccacgccgcgccgcgaaaggcgttaacaaagtgggcaaaggtaaagccggtgggcagcaggccgttccattgtttactcaggctggagagtaaaatcaccgccagcggcagcaggaaaacgccggcaaaaagcgtcaccgccagcgcgcccgccgccgcgcggcctttacgcgaccaaatcaacatcgttaactccttacgccagtgcgcgccgccgccagccgatagagcataaacagccccagcgacagcagaatattgatcagcgcaatcatgcaggccacgctgtaatccgactccagaatcgccttgctgtagaccatcatcggcagggtattgacccctttggcgccaataaacagcacgatcccgaactcgttagtggtcaatagcaggcacaggctgccgcccgccatcagcgccgggagcgccgccgggaagataacctgggtaatcacccgtaacggatgagcgccgagaatactcgccgcttccagctggctcttatctatctgccgcaatcccgccatcagcggacgcatcaccagcggcgtaaagacggtaatctccgccagaatcacgccgttaatcgaatagaggaagtctaccggcggcagttcaaaagcaaacagcgccatcagggtgccgttgagcagccccgccgagccgtaaataaaggtgaacgcgagagtgataagaaaggtcggcagcgcaataaaagtatcaatgacccggctcaccagttggctgccggggaacggaataaacaccagaatcagcgccagcacgctgccgagtaccaggcagccaagggtagcgaacaccgcaatctgtaaggtattgagcagcgcgccaataaagcgttttgagtcgatcacctgccagaaagtctcgaggctcaggttgccgctggcgtcacgtaatgcctgttcggcgatcagcagtagcggatagaaaaatagcgtcgccagcaccagcagcggcaatgccagccacaggtaaggccgtaaatttcgcgccggacgcgcaagcgtgagggtttgcgccatcattgcacctcgatcagaaccgcatcgccaggttcgaagtagagcgccagcttgtcccccgcgcgcggcagcgggttcacgtgggtcatcacaatccgcaccgcttcgccggcaacatcgcacagcagatgcgtcagatcgccctgccagtgcaccgacgtcagggtggcgttgagacgattactagttgccgatcgcggcgccaggctcatgtgctgcgggcgaatgcataacagtttgttgttgccatgcaggccgccccggctgaaggcgttaatcaggccgccgccacagctcacgctaaccagccccggctcggggctgtctttcagcgccgtcgcctgcaggatattggcacggccgaggaattcggcgctaaagcggttcggcggatagtggtacagctcgtgcgtttcgccgtgggcgatcagcgagccatctttcatgatgccgattttgtccgccagggtcagcgcttcggtctgatcgtgggtgacgtagagaatggtcagttccggcagttcgcgatgcagacgggcaatctcttccaccatgttatggcgaatttgcgcatccagcgccgacagcggttcatcaagcaacagcacccgaggacgcacggcaatcgcgcgggctatcgccacgcgctgctgctggccgccggaaagctgatgcgggtagcgggtggcgtaatccgccatgccgacgatttttaaggcttcagtcacccgctcggcgataagccccctggactgcttttgcgcccgcaggccgaaggcgacgttatcttccaccttcatatgcggaaacagcgcgtagttctgcaccaccatcgccagcccgcgtttgtacggcggcagctgggtgacgtcagtatcgccgatcaggatccgcccgccagccggttgcacaaaaccggcaatcgcccgcagcaccgtggttttcccggaaccggaagggcctatcagcgccagcacctcaccgggttcaatggtcaatgacagcggttttaagaccacgttgccgtggtatgaaacgcgcagcgagtccagggtgatcccggaagtccccgccagcgacggggaagaagtgacggtggctttcatcaacatcaggcttactcgctatcggtcactttatgccagcgggcaatgtcagccgacagcgataccgcgacatcgtcccagttaggttcccagctcttcacgccgtcgagcgccgctttcgccgccttaaagttagcatcatccggcgctacatcgctgcgtaccggcaggccccaggagcgcgcgctgacgctggattgcgccggtttatccagcaggaaattgatcagctttttgccgttttcgctgttcggtccgttctgcaccagcccgatggtgtagggcagcgccagcgcgctgcgctcgcctttgtcatccgccggccagaaaattttaacgttcgggttacgcgccatctgcgacaggttcatctgcagatcgccgttggcgacgtacagctcgcctttgttgaccagcgccgtcagcttaccggtcgaggccgatgggccaacgttattggcctgcagcttacccagatacgcaaaaccggcgtctttaccgccgaggctatggaacgcctgcagcatcaccgcggtaccgtcgcccgcctgacccggcgtggagtactgcaacttgttcttgtagcggctatccagcagatcctgccagctggccggcgcgcttttcagcaactgactgttatagatgaaggtcagatagttattcaccagcggcgcgtagcggtcgttagcgccggggatctgcgcgctaccttgcggggtaaaggttgccagcaattgctctttcgcggcgcgctggataaacggcggcaccgtgaccaacacgtcagcctgtggattggtgcgctccttcgccagacgctcgacgatcgcgccggagccgccttccacatactgcactttgatgcccgtcgctttggtgaaggcagcgaactggctctgataccagctgttatcgccgtcatgcaggccgtcggcggagtaaaccgtgacgacgccgtccgcccaaaccggagagctggtcagcgcgaacagggacagcagagcaaatcgggagagtttcatcgtgtaagcctcatcgaatagtcagttattctggtgtagaccagatttagcttcacgctaccgggggtatatgacaaaacgatgaaaaaagtgtgtcgaaggagttaaaacgaacgggatgcgtagccccggcacgcgctagcgccaccggggagatcaaaaaatttaactaataaaatcaatgggtatcgacttcgatccgcaggctatcatgccgccagtattcaatatcgtaatcgagaatacgcccgtgctgatcgtaattcagcctgcgcaacagcagcgccgggcgcccctccatcacccccagcgcctcggcggcctgcggcggcattgaggtgggataaaacgacagatgcatactggtatagatcagttcgtagtgagtttgataaatctcggtcagactgccgttgagatcgtggcgcagcagctcaggcacccgcgcgggcagacagtggttttcgcagtagcataccggccgcccgtcggcatagcgcagccgggtcagcaggtagacctgatcgaagggctgcagcgccagaggcgccatcacatccagcggcacggcagccaggcggccatcaagcagcaccgttttcggttcgcgcccctgttcgagacacagcttgtggaagttggtattttgcgtcggatccagccacagacgctccggcgtcacaaaccagccgcggcggtcggcgcggtaaatcacgccgctggcctccagctgcgccaggctctcacgcaccgtaatccgcgtcgtgttgaacagcgcgcacagctcgcgctcggaaggcagcttgtcgccgcttttgagggcgccgttttgaatacgcgcctgcagctgcgccttaatcatcaggtattgcggcatctcgccagagggtgatttcatgtttactcactgccacttttcgtgcgctcattatacatagccagatgaattttttgttgcagcgccacatttcctttgaccctgtcccggctttgtctccatgataactataaatctggtatagaccaaatggtgagacaaatgacttcacgaaattacctgctgctgacccccggcccgttaaccaccacccgtacggtgaaagaggcaatgttgttcgatagctgcacctgggatgatgattacaatctcggcgtggtacagaccattcgccagcagctagtgcagttggctaccccggccgacggttatacggcggtgctactgcagggtagcggcagctacgcggtcgaagcggtgctcggcagcgtcatcggcgaacagggcaaagtgttgatcgtcagcaatggcgcctatggcgcgcgtatgattgagatggcgcagctgatgggcatcgcctgccacccttacgactgcggcgaagtctcccgtccggacgcggccgcgatcgaacagatcctgcagaacgacccggcgatcacccatatcgcgatggtacacagcgaaaccaccaccggtatgctgaatccgatcgaagaggtggccgaactggcgaaacggtacgataaacgctatatcgtcgatgcgatgagcagcttcggcggcattccactggatatcgccgcgctgaatattgattacctgataagctccgccaacaaatgcattcagggcgtgccgggctttgccttcgtgattgcccgcgaagcggagctggccgcctgcaaaggccgttcgcgctcgctgtcgctggatctgtacgcccagtggcgctgcatggaggacaaccacggcaagtggcgcttcacctcgccgacgcataccgtgctggccttcgcccaggcgctgaaagagctggcgcaggagggcggcgtcagcgcccgctatcagcgctaccgcaacaatcagcgccggctggtcgccgggatgcgcgcgctcggcttccggccgctgctcgacgatagcctgcactcgccgatcattaccgccttttattcaccggatgcgccgcagtatcgctttcacaccttctaccagaagctgaaagatcagggcttcgttatctatccgggcaaagtatcgcaaagcgactgcttccgcatcggcaacattggcgaagtctacgacgccgatatcaccgccctgctggcggctatcgacaacgccatgtactggaaacaataaggaaccgccatgaaccgtattagcgcactgatccttgactgggcaggcaccaccgtagacttcggctctttcgccccgacgcaaatcttcgtcgaggccttccgccaggccttcgatattgagataacccttgaagaggcccgcgtgccgatggggcttggcaaatggcagcacattgaggcgctgggcaaactcccttctgtcgacagccgctggcaggccaaattcggccgcgcgatgacggccgcggatatcgatgcgatctacgccgcgtttatgccgctgcaaatcgctaaggttgtcgatttttccgcaccaatagccggcgtggtcgacaccatcgccacgtttcgcgccgagggcctgaagatcggctcctgctcgggttatccgcgcccggtgatggaaaagctggtaccggccgccgccgcccagggctacgccccggaccactgggtcgccaccgatgaccttgccgccggcggtcgtccgggcccgtggatggcgctgcagaacgtgattaccctgggcatagacgatgtggcccactgcgtgaaggtcgacgacgccgcgccgggcatcagcgaagggttacatgccgggatgtggagcgtcgggctggcggtgtccggtaacgaattcggcgcaacctgggaggagtaccaggcgatgtcgaaagcggaaatcgccacccgccgcgagcgggcggcaggcaaactgtatgccgccggggcgcattatgtggttgataccctggcggacctgccggaagtgattgccgacatcaatgcccggctggcaaaaggcgagcggccttaagcgggtgaattcaccttcactttggccgccaccagcaggccggtaaacagcatcaatatccctgacaacaccagcggcgacagcagccctaagtggtcaagcgcaatgccgccgaccgcggcgccgcaggtgttggccagctggatcaccgccacctgaatcgacccggctttttccgcctgatcggagagggaacgggtgatccacgttgaccaccccaccgggatcagcgcaaacgcgaagccccagataatcgccaccgtcgaggcgatgattttgctctctccccacagcaccagcgccaccgcgcaggcggtcagcaccagcggcgcgatcgccagcgccgcttttaccgaacgcttgagcagcaccgaggagagcgaggtaccgataaagctggcgataccaaagctcagcagcaccagcgtcaggccgtcgacatcaaacccggcgagggtcatgtacaccgggcgaatataggtaaagaaggcgaactgtccggcaaaggccatgaaaatggcgcacattccggccatcacccccggacgcttcagcagaccaaacatattttgctgctgagaagccgattcaccgggcagcgacggcagcgctttcagcacccagagcgtacacagcacgcccattaccgccgcgccgttaaagacgttgcgccagccgataagcccgccaaggaaactgcccaacggggcggcgatcaccagcgcgattgataccgcgccgaagataatcgatagcgctttcggcaccacgcgcatcggcaccagacgcatggtcagcgatgcggacatcgcccagaaaccgccgagcgccaggcccagacaggcgcgccccagcagtagcagggtgaagctatcagcgaaagataccagcaggcaagaaagggtcagcagcagtgaaaacaggataaccacgtagcggcgatcggttttacctatcaccgtggtgataaacaggctggaaaacatcgcgacgaatgccgtcgtcgtcaccgactgcccggccatcccttcggagatgcctaaatccagcgccatcggcgtcagcaggctgaccggcaaaaactcaacggtaatcaggcaggcgacgcagaaagcaaccgcgaaaaccgccgaccagtttggccgcgcgagatcgcgtgcatggggtttggtttcatttgaatgactcatgagtgacctgcgaagaaagtggcggaaagctgcgcagtgtaacattttgtatgtgacgtacttaacgttttcgcaactcttctcgcttttcataagagggtgcgtagctgctcgcatgtttaaaaaacgatgcttgctatcgctttaacaaatctcaggagaatttaatatagcactatgtgctatacttttaacgacaggatgtcagcaatgcgtatctttaaaaccaaatggttcgccagagaggctagctctcatggcatttccgacgacgagctctatcaggcaattcaatctgcgcttcagggcaaagtggttgatttaggaggaggggtttataaaaagcgactcaacaagaatcgcgatcgcgcaatcatccttaccaaaagcgcagagtattggttttatacctttctatatgccaaacaggatatggccaatatcaaccatcgcgaattaatggggtttcgtgagttagcaaaacactatgccaatctctctgaagagaaaacgacggtcttagttaaaagtaaagaactggtggagatttgcgatgacagcaaaaaataaatacaaaagcccggctttcgaagcgatccatagcgctgcgtcggggctattcagcgttggcgcaatcccacaggaaacaatgcgccattttgatgaatcatgtctcggtagcgtagccacacttcaacccattgaaattaaagcgctacgtgaacaactcaatgttagccaacccgtgttcgctcgttatctgaataccagcgtgtctaccgtgcaaaaatgggagactggcgctaaacgaccgagcggaatgtcattaaaattgcttagcgtcgtacaaaaacacggcctgaaaatcctactgtagttatcctgccggatggcgcttacgcttatccggcctgcaagtgacgagtgcggaaaccgtaggccggataaggcgcagccgccatccggcacacaaaagcgatgaaccacaggccggataacaatgagatcagtgcagccagtgcacgccgtcttccgggagaaacaggtcgttgtagcgctgctgtaggttatgtaaatcgctcacatccgggtccagctcgcgcagaaacccttgcgccaggcggatctgcgcctcggtaatcggcgccgctaaacgcgctttttgcatcaggcgataccagtaatgcaggtttttttcgctggcgtcgacaatcgcgacctgccagatgagcagcacctgggcggcgttctgcagatgcgcttcattcggccgctccaggtaacgcaaatactcattaccggcggtttttcccagctgatcgatcatcgattccagcgggacaggcgtgatgccgaggcgttcgctcaggcggcggatcgcgcggcgtgaatcagaggtaagcacccgaaatcccacaacaaacaccactaccagggtggccagtcctatccagatcatgcatcctctcatccaatcgcagcctgactatcataatgggaatttgcctgctgtcgactgtcggacctggcataatgcgcaagaaataaaaaagcccggcgcgaaggccgggcaaggttaccaaatacctggtgaatcaggcggtctgcaaaatacggttctttttctcgcggcgaattttacgctcttcaaagatagccacgatggccatcaggcagatacagccgacggcggcggcgtccagcgccgcaaaggtgccggcccagccggtcaggccgaagaccggggtgccgtcggcgatcatcccgagacccagtttggcgaagctatcgccgatcagataggcgaaggtgcccttgatcccatcggcggcgccgatcgcttttttcggtacgaaaccgacggcggcgacgccgatcaacagctgcggaccaaacaccaggaagcccagcgcaaataacgaggccagatagacgtactggttgctggcgtgttggtaaaccccgagggtggcgataatcagcgccagcgcgatgcaggccaccagcgcgcggcggccgttggccagatccgacagccagccccacagcagcgtgccgaccagcgcgccgacctcaaacagggtaaagccctgaatcgccacctctttcgacagcttcagctcctggaaggcgtacacggtggaccactgatcgataccgatacgcaccacgtagaggaagatgttggagaagcacagcagccagatcactttgtttttcagcacgtactcaacaaagatctgccacttggtcatcgcattttcttcggtctctttgtcctcttcgctgatcgcttcgccaaacagctcttccgccgtgccgaggccgtaggattccggagagtcgctaccgtagcgcaggccgataaagccaacgatcagcgcaataatcgacgggaagataaacatgccgatcacatggccgtcgaacagatagttggcgccaaacagcgccacgcccgccgcgcccgcgccgccgaggttgtgggagatattccagaagccgaggaaagtgccgcgtttgcgtctgggcgtccacttggtgatggtggaatagctgcacgagccgccggtgctctggaagaaaccgctcagcgcatagaaggcgatcatcaggaacaggctggtagaacccgcccccatgctggcgctaaagcccagcatacagatggcggagaggatcagcataaacggcaggaactgcttggtgtttttgccgtcggcataataagagaccagcgtcttgcccacgccgtaggtgatggagaagcccaggccaatcatccccagctgggtcatgctcagcccgtaggtggagatcatgtcgttctgcgcgatgttaaagttcttgcggatcaagtacatggtcaggtagccgatgaaaaccaccagataggactgcatgaaaggtttgaaccacattttgcgccgcacatcgagcggcagatccaaggtcggcttgcgcacctgattcagaaaggccagcatgggtatctcctgagctgattttttatgcctgcgtaataaccaggcattgtaaaaaccagcgcgccgtctggcctgagacggcgtccaggtaaaaccgggaaaatttcttagttttgccccgttcgcggcgaaagggtgagctacatcacgcttcgctggcggtacgcggcgcctgcgcgtttaaaaacggcagcagcagcagcgcggaaatgccggcggcaatcgcaatcaccacgaagaatccggtccagtgccagatatccatcacctgcgccagcggccaaccggaaagcgaggcgccaagataagcgaacaggccgacaaacccggttgccgccccggcggcttctttatgcgaacattccgccgccgccatgccgatcagcatctgcgggccgaaaacgaagaaaccggtagtgaagaagcaggccgcctgcatgacatagctggcgaacggcatcagccacaggccgccaaccgacagcaaaattccggcggcgaaaatcaggttcatcggcccacggttgccgttaaacagcttatccgagccccaccccgccaccagcgcaccgataaaaccgcccagctcaaacatggtcaccgccgagttagcggtcaccagatcgacgcctagcgtctccgacatatacagattgccccagtcgttaatcgccgcccgcaccacgtacaccagcacatagcacaacgacagcagccagatgtagggattggccagcacgtagcgggtcaggatcgctttacgagacatcccagcgccttcctgctgctgggcgatttccagcgcatcgtgacgccagtcgcccacggcgggtaaccccaccgcctgcgggcgatcgcgcagccgccagcacagatacagtccggcgaggatcgccagacagccggcaatggtcatcccggcacgccagccgtagtgcaacgccgccgctcccaccaccatcgggatcagcgcgccgccgacgttatgcgccgtattccatagcgcccaccagccgccgcgctcggtccgcgaataccaggccgtcagcagtcgggcgcagaccggcgagccccagccctggaagaaggcattcagcgcccacagcagcgcgaaagcccatagtgaggaagaaaaaccgaacagaatattcaccaccccggtggcgataagccccagccccataaaatagcgggcgtcggagcggtcgctgacgataccggagaaaaatttcgacagcccgtaggtgatatagaacagcgtggccagcaggccaatatcgctgcgggtcaggacgttgctggcgagaatttccgggaccgcggcgttaaagcttttgcgggtgaaatagaacagcgcgtagcccagccagatggtcaacaggatatggcgacgccagtagcgataacgcgcatcaagttcgcgtttatcgctaatcggcgcagcgtccggcggggcttttaaaaaggcgaacatcggcgatcctctcaggcgtaacgcagcggtagattgacgcacacccgtgtaccatgggtgcaggagatcgtcagtgtgccgcccagggcggtcacgcgctcgcgcatgccggtcaggccgaacccctgcagattcgaccccggcggcaggccgcaaccgtcatcttccagcaccagcattagtcgctcatcctgctgccagccctgcagagtgacagcgctggcgctggcgtgcttgacgatattattcagcccctcctggcaaacgcgaaacagggtcacgcgctggttctcgctcagtcccgcctcgttaatccgccagtcgagatggctgacaatgccgcggtcctccagctccatctcgcgcatcaacgaacgtaccgcctgctccagcggcaggtcgtcgagctgacgcggacgcagacggcccagcagtctacgcaccgagtcgtaaactcccagcgacagctgttctatcagctgaccgctctggcgcacgctggcgttgtccggcgccagccgctgtacgatcccggcctgggtgcggatcgcggtgatggtctggccgatatcatcatggagctcgcgggcgacgtctcgccgcacgctctcttcggtctccagcaggcgttccgccagccgacgattacgcgccagctcgctttgtaatgactggttcagctcgcgtagccgctggatccccgcccccaacagcagcccggtgaggctctgtgccagcagggaaagcaataaatcgaccgggtgatcgtgccaggtctggctggcaatcaaggcgatagcgttcatcagggtggcgatcagcgctccctgccagccgtagtgccaggcgagggcgataatcggcagcgccagacaaaacggggtaaagcgggagagctcggcgggcaggccaagctgcagccacaggctaatggtgaataacagcagataccagatcagatgccgcccgcgccagttaaccggctgcgccaccagcgccggccccagcggccgccagacggtgctggtaagatagtgccagaaaaccaggcaggtcggcgccagcgtcaggccgccggtcagcgtcaacagcagggcgttaagcccctcgtccccctccgccagccacggcagcgattgcagcagcgcggcggccattaacgccccgccctgacgcagcagcgtcagccagtcgcgctgctgccggtagcgcgagatcaacgccaccggcagcagagtcagcaggcttccggtcatcaaaattatcgggtgcgccagcgccacctcctgcgccagccataagataagcagccactcggttcccagcagcactggccagtagccgcgggggcattgcagcattaaccccagccgcaggccaaagggaaacagcagcaccgctaaatccgcgcgttccaccaaatgcagactgatgctccacaggcagaaccaggcggccgcgaagataaaggcgcagccgatgaccgacagcaatcgtgagacgacggccttcattgccagctatcgaacatgcggcgcgccagctcaacgtcgttgctgacgcccagcttttccagcaggttggcgcggtgtacgtggacggttttcggcgacagaccgagctcggcggcaatctctttcaccgccatgccctgcgccagcttttccgccacctgacgctcgcgtttggtgagcggatcctggcgcccggcggccaacttcatggcgatatccggcgtgagatagcaaccgcccgccgccaccgtgcgtaccgcggcgataagttcatcggggctgcagcgtttcgacaggaagccgcgcgcgccggcattcaacgcttgctcgatcagcgccgggctatcgtgtaccgacagcatgatggtcgccatccccttcggcagctggctgagcagctccagcccggaaatatccggcattgagatatcgcagatacagacctgcacgccgcgccccggtagccccgtcagcgcctcgcggccgctaccaaattcggcgacaacctgaaaatcagcttccagccccagcagctgagcaaagccggagcggacaatcaaatgatcgtcaataagggcgatggtggtcatggtgtgtcctggtgcctgaaaacgccggatggcggcgtaaacgccttatccggcctacggattcactgcttgtaggccggataagcgcagcgtcatccggtaaaggcgcttaccttagcgataagcgcgtggctgttcaagccttgagcgctattcgaagaacaccgcaattttgttaaacatggtgggatcggactggttacgcgccactttggtgacatcttccagcttttcaatctggctaatcatctgccccagtcgctggtcatcatttaccagcagccagatgcggctgtgttcgctgccctgaattggcagacagagaatgccttcgacgttaaacgcgcgacgggcaaaaagcccgcacacgtgggtcatgacgccgggatggttgcggacggtgagttccagaatgacgttatcacattgtttttgcatggcttattcccccaccatttcagtattggccgcacccggcggtaccatcggatacactttctgctgtgcgtcgatgcgcacgtggatcagcgccggccccggacggtcgatgatcgcctgcagcgccgcctgcggatcgacttcattatttaaatcacaggtttgcaggccaaaaccggcggcaatctgcataaagttaatcatccccggataggtggcggcaaaaacgccctgctgatagaacaggctctgctgctgatgcaccagccccagcgcttcgttgttcagcaggataatttttacatccagctgattttcggcggcggtggccatctcctgaatattcatcatcaggctgccgtcgccggagaagcagataaccttgcgctgcggattcgccagcgccgcgccgatggctgccggcaggccgaagcccatggtgccgaggccgccggaggtcagccactggcgcggacgattgagcgggtaggcctgcgccgtccacatctggtgctggccaacgtcggtagtgatgatcgcttcatcatccacgcaggcggccacggcgttaatcaggccgtaatgggagagcgggtcgctttcctgcgggatggcgcaggggaattcgcgctgcaagtcggccaccagctggcgccattcctcgcgcggctgcgcctcaatatgcgggttcagctgggctaagacttccgccacatcgccctgaatcgccacgtgcggttgcttgattttgcccagttcggcgcggtcgatatcgacgtggataatcttcgcgttcgggcagaactgctcggtcttgccaatcgcccggtcatcaaaacgggcgcctaaaacaatcagtaaatccgcctcctgcagaataaagttggtgctgcgcgcgccgtgcatccccagcatccccagcgacagcgggtgcgccttcggcagcatgcccagcgccattaaggtcatggtggtcggcaggttggctttttccgccagctcacggatcgcctgcggcgcgttaatcaccccgccgcccagatacagtaccgggcgtttcgccgcgttgatcattgccgccgcttcacgcacgctttcaggcgcgaatgccggtgccggggcgcgctcgccaggctcaggcagcgcttccagctcaatggtcgccgactgtacgtctttaggaatgtctatccacaccggcccgggacgcccggactgggcaatacggaaggcgtcgctgatcacctgcggcagctcggcaatgtcgcgcaccagatagttatgtttggtgatggggatagagatgccgtaggtgtccacttcctggaaggcgtcggtaccgatcatcgaggccggtacctggccggtgatgcagaccagcggaatcgaatccaggcgggcatcggcgatcgccgtcaccaggttcgtcgcccccgggccgctgcaggccatacagaccgccggcttgccttcggtacgcgccatcccctgggcgataaagcccgcgccctgctcatggcgcgccaggatgtggcggatctgcgtgctctggcttaaggcatcgtagataggcaggatggagccgcccggaatgccgctgaccatagtgataccctggcgctccagtaaatgaacaaccagctgcgcgccggtaaagcgcattgtgtttgatgtggtgcccgaacttgccatgctccagtccttttcttctgggccgactttaccggggggctcgccaacaaaaaaccccgctcggtttgcgccggcggggtttggaattcgtgttgttccggaccctacggcgcattgccgacgacgaccaccacagacacgacgaccaccgcggctggcgcggtttttagtagggtcgaagcgatcagggttgcgttcattagggacctgttgtgtcgaaaaataagctgaatttatacaaacacaggttttacgttttcacaatggatttattttcatccacgaaaatttgcgcgaaagatcacagttcggcgcaaaagggcagaaaacaaaaaaccccgccggagcgaggtttttatcagcatggttacaggtggtagccgcaagcacactgtattacgtcaacgccaaaagtatacgcgatcgctgcagttcgcgcaatttaaggtcggtttttctctgtcatagagtatggatgagaggggcggatttgtccaaaaaatactgttcatccatacagtatttatttatactgggtgtgttcactttgtgccattcgggggccgcaagtttgaccggcgcaacgaagtcctggctgaaacgggtggtgccgtcagtgccttaaccccgagagagcacactgtgttacgtcaacaacgtgcagtcactggcccgcgcggcaacgcgtggttcagcgctgcgcacccctgtcgttgcaggcggcgggccgggaagccgttcatggaaaggacgaactatcggccagggcagacgccgccggcgacaggcagggataagctggcaacgggcagcggaaaggtacgtcagcttattgtgctccttaaccacaggagacgcgcgtatgggcggaatggatattattattttgatcctgaaactcatggttgctgtgttgcaactacttgatgcagtcctgaaacagttccgctgattcaggttcaagtcgcacctgaggggggcgggaaaccgcccccctgcaggcgcccgccgggcgtcccgggatgacttgatggaggaagctatgccacccctgttaattgccgccacgacgccggatgccccggggttcgcggcgctacgaattgaaagccttgaacagcatttcaatatgctgcgccgcctggcggaaaactggcagagcggcaaaaaccgctttaacgcgccgggcgaaacgctgctgggcgccttcgtcaaccaccagctggtaggggtatgcggcatcaatagcgatcccttcagtccgcagccgcgggccgggcgcattcgccacctctacatcagcgaacgctatcgtcgccggggcatcggccagcagctgctggtctcggttatcacccactccagcgcctggttcgactttctcaacacccatgccccggcgcaggcctggcccttttatgaaaggcttggttttcgcccggtgtacgatgaaccgcgggtgacgcatcgcctgttttgttcgctttaacccccgctggcaggcagcgcgggcgcgtgttacattccggtgaccttcactgttgaacctgtctgcgatgaccctcaccgtattctgcattttgctgttcgccgccctgctgcacgccagctggaacgctatcgtcaaagccagcggcgataaaatgtacgcggcgatcggcgtcagcggctcggccgcgctgatcgccctggtgatgctcccctttgccccgcagcccgcgctggtcagcgccccctatctgctggcgtcgtgcgcgttacaggtggtgtatacggtgctggtggcgaagacctaccaggtatcggatatgagccagacctatccgctgatgcgcggcactgcgccgctgctggtggcggcgataagcgtgctgttcctcggcgatcgtctgtcgccgctggcctggctgggcataggcgtcatctgcctggcgattctggcgatggcctttaacggccgcgccagctcgcgcaaaggcatcgtgctggcgctgatcaacgcctgctttatcgccggttatacgctggtggacggcaccggcgtccggctggcgggctcggcgctgggctacaccctgtggaccttttttatgaacggcttctgcctgctgtgctgggcgatggtggcgcgacggcgtgaggccagtcgttatttacgtcagcactggaaaaaaggcatcctcggcgggatcggcaccatgggctcctacggcctggcgctatgggcgatgacccaggccccgctggcggtggtcgccgcgctgcgtgaaacctccattctcttcggcgcgctgatcgcctttatcgtcctgaaagagcaactgatgccgctgcgcatcgtggccgcctgcgggattgccgccggggcgatcctcctgcgcctggcgtagcctgagatggcaacattagttgccgttcctgtttacataatctgcctggaattccctcaacaatcggcactttgcagttgttctgtcattttaatatggtagattcctccatcgtttacgggatgtggtagtcacatattcttcatttctctttactcacaaagtattcatcgacatgaaacggcataagaacttcaatttgttgttgatgctggtactgctggtggccgtcggccagatggcgcagaccatttatattccggccatcgccgacatggcggtcgcgctgaacgtccgcgaaggggcggtacaaagcgtgatggcggcctacctgctgacctacggtatttcacagctattctacggcccgctctctgaccgcgtcggtcgccgcccggtgatcctcgtcgggatgtcgatttttatgctggcgacgctggtagctattaccacccatagcctgccggtgctgatcgccgccagcgccatgcaggggatgggcaccggggtcggcggcgtgatggcgcgcaccctgccccgcgacctgtacgaaggcgctcagctgcgtcatgccaatagcctgttaaatatgggtattctggtcagcccgctgattgccccgctgctcggcggcatcctcgacaccctgtggagctggcgcgcctgctacgctttcctgctggtcctgtgcgccggggtgaccttcagcatggcgaagtggatgccggaaacgcgcccggaaggggcgccgcgcaccaaacttctggccagctacaaaacgctgttcggcaccggcgcctttaactgctatctgctgatgctgatcggcggcctgtcggggattgcggtattcgaagcctgctccggggtgctgatgggcgcggtgctcggcctgagcagcatggcggtgagtattctgtttattctgccgatcccggcggcgttcttcggggcgtggtttgccggccgccccaacaagcgtttcccgaccctgatgtggcagtcggtgatctgctgcctgctggcgggtctgatgatgtggatcccagggctgctgggcatcatgaccgtctggaccctgctggtgcctgcggcgctgttcttcttcggcgccgggatgttgttcccgctggccaccagcggcgcgatggagccgttcccgttcctcgccggaaccgccggggcgctggtgggcggcttgcagaatatcggctccggcgtgctggcctggctgtcggcgatgatgccgcaaaccggtcagggcagcctcggcctgctgatgatgctgatgggcctgttgattctgctgtgctggctgccgctggcctcgcgctttacccaccatcagcagccggtataagcgcggcggccgttccccggatggcggctgacgccttatccgggctaccggactggtcgtctgccggcccgcgcaagcgcagtgccgtcattttgccgggtggcggcgcacgccctacccggcctccctaacaactccgagggatagcccggctctttttcaggtcaggctatgcagccactcgataaaggcgtcgattttcggccactggcggcccggcagggtggtcacatagtagtgctggtggcatttcagcgtcatatcgccgaacggggcgatcaactccccactctccagccgcttctgcaccagccgcttacgccccatcgctaccccgacatgattcatcgccgcaatcaccgctaaatcagaacgatcgaagccgatgcccgacgattgcggcagttcaatcccaaattgttgtgcccaactgaaccattcatcggtgccggaatcattgctccatgcctggcgatcgtgaagcagcgtacagtggcgcagactggcaggatttgacgttaactgcagctggcgggcgtaatacggcgtacataccggcacgatcgcctcatccatcagaaaatggtggcttagctgcgacgacggcgcgtcatcaaaatagattgccagatcgatacccgcccgctgcaggttgacgttatcgttgccggtcagcacggtcagcgagatggccgggtagcggcgactgaaatcccccagcgccggcaccagccagcactgggcgatagagggccgcgagtagaccgtcagactgccggagagctcctggtttttgatgtccagaatctcctgattgagaccatccagcgacgccttcagcgcccagtaaacgcgcttcccttcacgcgtcagctccactttgcggtgcgagcggacaaagagctggatccccagctcctcttccagctgattaatccggtgactgacggcgcttggggtgagcgccagctcgtcggcggcaagggcgaacgactcgtgccgcgccgccacctcaaacgtcgacagcctggagagttgccagccgttcagcaaccgggtacctaaggttattagcacatccactatgcgctcctggcgataaaagggagtctggatgataaaaaaataacgccggaacttccgctaaaggatgagttaatttgacccatagcatatttagaggtcacttttagagctaaatcacctttttgattcaatttggctcatctgaaaggttatttatatcgtttgtcagcccatgccgagtttctgttcaataaccacacgttacttacggcgaggtggggtatggaatcgcaaatttgggttgtgagcacattgctgattagcatcgtgttaattgtattaaccatcgtcaaactgaagtttcatccgtttctggcgctgctgctggcgagctttttcgtcggggcgatgatgggaatgggcccgctggagatggtcaacgccattgagagcgggatcggcggtacgctgggcttcctggcggcggtgatcggtctcggcaccattctcggcaagatgatggaggtctccggcgcggcggagcgcatcggcctgacgctccagcgctgccgctggctgtcggcggacgtgattatggtgctggtcggcctgatctgcggcattaccctgtttgtcgaagtcggggtggtgctgctgatcccgctggcattctccatcgccaaaaaaaccaatacttcgctgctgaagctggctattccgctgtgttccgcgctgatggtggtgcactgcgtggtaccgccgcatccggccgcgctgttcgtggcgaataaactgggggctgatatcgggacggttatcgtctatggcctgctggtcggtctgatcgcctcgctggtcggcggcccgctgttcctcaggctgctcggcaaccgcctgccgtttaaaccagtgccagccgagttttccaacctcgacgttcgcgaagaatcgacgctgccgtcgctcggcgctacgctgtttaccgtgctgttaccgattggcctgatgctggtgaaaaccgtcgctgaactgaatatggcgaaaggcggcacgctgtatacagtgctggaatttatcggcaaccccatcaccgcgatgtttatcgccgtctttgtcgcctattacatgctcggcatccgtcggcaaatggggatgggcgttctgctgactcataccgaaaacggctttgggtccatcgccaacatcctgctgattatcggcgccggcggcgcattcaacgcgattttgaaatccagcggcctggccgatagcctcgcggtgatcctgtcgaaccttgatatgcacccgattttgctggcctggctggtggcgcttatcctgcacgccgccgttggctccgccaccgtggcgatgatgggcgctaccgccatcgttgccccgatgctgccgctttatcccggcgtaagcccggagatcatcgccattgccatcggttccggcgccattggctgcacgatcgtcaccgattccctgttctggctggtaaaacagtactgcggcgccagcctcagtgaaacgttcaagtactacacgacagcgacatttatcgcgtcgctacttgcactggccgccaccttcctgctttctttcatcatctaagcgaacgagacgtaatatgaaaaacgctgacctgaccaccttaaccgcgaccttcccgcttgtgcaggatctgatcgccctgaaagaaactacctggtttaacccggcaaccaccaccctggcggaggggttgccttacgtcggtctgaccgccgacgatgtgcaagacgcccatgcccgccttcagcgcttcgcgccctatctggcggcagccttcccggaaaccgccgcgagctgcgggattatcgaatcagaagtggttgccattccggcaatgaaacgcagccttgagcaaaaattcggccagccaattagcggcgaactgctgctgaaaaaagacagccatctgccaatctccggctcaatcaaagcgcgcggtgggatttatgaagtgctgacccatgcggaaaagctggcgctggaagccgggctgctgacgaccgcagacgattatcgcaaattgctgacgccggagtttaaacagttctttagccagttcagcatcgccgtcggctccaccggcaaccttgggatgtcgataggcatcatgagcgcgcgcattggttttcaagtcacggtgcatatgtccgccgatgccagggcgtggaaaaaagccaaactgcgcagccacggcgtaacggtggttgagtatgaagaggactatggcgtggcggtcgaacaggggcgcaaggcagcggaatccgatccgaactgctttttcattgatgatgaaaactcacgcacgctgttcctcggctatgccgtagccggcgagcgcctgaaggcgcagtttgccaaagcagggcgcgtggtcgatgccgatcacccgctgttcgtctatctgccgtgcggcgtcggcggcggccccggcggcgtggcatttggcctgaagctggccttcggcgaccacgttcactgcctgttcgccgaaccgacccattcgccatgcatgctgctcggcgtctataccgggctccacgaccagatagcggtgcaggatttaggtattgataacctgaccgcggccgacggtctggcggtcggcagggcgtccgggttcgttggccgggcaatggagcgcctgctcgacgggttctatacccttgacgaccagacgatgtatgacatgctgggctggctggcggcagcggaaaatatccgccttgaaccctccgcgctggccgggatggccggagcgcagcgggtctgcgccagcaaagcgtaccatcagctgcaggggctgagtgagcaacagctgcagcaggccacccacctggtgtgggccaccggcggcggcatggtgccggaagaggagatggcgcagtacctggcgaaggggcgctaatctttagcgcagcagcggcatcagcgcctctggtggccgctgctgtcgtcgcaggtcccgcatcactcgcatatagggcccgctaaaatcgtagaactgccggtaacccgcgcacagcgggtcttcctgttcgccacagcggcacaggcgcagccacgggcagccgtagcaggtgctgttggccgccggcgcgcctggctgggtcagcgtctccccacaccaggcgctcagcgtctcgctaaacagtaaaatattgatgcgcccaatatcttcccgcacccagcggtgaaagactgcgcagagaaactctccccaaagcgcggcgtcgccggccgccagctgcggaataaaatggatagcggtgagcccctgttgacgaagctgtgcatagaacgcctgcggttgatggcaatgatgcgcctccaccacgacagcctgaaagggagtgtcatgttgctggccgggggcatgagtgagaggcaaattcgccggacatcctgtcatgacatatccctaatgaataaaacgatcggttgaaggtgagtaacagcaaacaggaatgccagagaaagtactgcgagtgcgatcaaaaatttgtcacgaaccgcccgcggctgtaaaaaatcgctatcgtcgacatccatcagatgacgacggcgggtatagccccagaggatcaccgccacaatcgccagcacgccgatcgacagccagaacggcaggccggcgcggtgccagctgtgcttaatcgccagcgccatcagcgcgccgtagcccaacagggtgcgaaaccaggccagcgaggtgcgctctggctgaagaccgggatcgctttcccgccgcgcccggcgtttatccgccatacaccaccagcagcatcaccgcggccaccaccgccagcagcagaatgctaatcaccagcagcgtgcgggtatagggaaggtcctgcttgagacgcatcgccttctcgttattcagccagcgcagatagccatagatggccatgccgccggcaaagagacacagcagcagggcgagaatttcacggatcagcggcgtggcaaagtccggcgctaactggtcaaggccgacgccggcggcgagaaaaccgagcgccgtgcggatccatgccagaaaggtgcgttcgttagccagcgaaaagcggtaatccggcgcttcgccgaggcgggagattttcattacagttccttgttcatcgcgctgcaggcttcagcatagcgtaaatcaggaaccggggagaagaaccggcgccccgcagggcgccggtagtacaacggggattaatgcagctcaggccaataatctttgttggcggcaatgaggtcgtcgaggatcgctttcgccaccgaggcgctcggcacggttttcgacagggtaatcgcctgccacagcttgtggtaagagcgctgttcccaggcatcgaccaccagtttttccactgccacctgctggctcatcagccctttctggaaatgcgggatgtcgcctaccgtcagcggctccggtccgttgtggcctaccagacaagggatctccaccatcgcgtcggcgtcaaagttatggatcgcgccattgttcggcacaatcagcagcatcctttcctgcgtgttaaaggcgatagccgtcgccagatcgacgatataggaggcatgctcgtcaatctccagatcgccggcggtggatttcccggcggcgatgatcgcccggcaggcgctgaagacgtttttctcccgatgatccatcacctcattggcgcgggtgcgttccgggttggagtgggctaccacatagtccgggaacagataatatttcaggtaggtgttcggcatggtctgcggatccagcgcctgcacatctttcgctttggcaaaggtgtcgttccagctggcctcggtgtgcggatcgttcgagggcggcacatagccgtatttcgccacatattcgcgcagtttcggcatcaaatcattgccgtcgaggtcctcaatcgacgtccaccagccgaagtggttgaggccgtagtagcgcacgcgcatctgtttacggtctttgaggccgacaatctgcgccatccgcccttcaatgccgatcggcatatcgcagatgttgaggattttggcgttcggccgcagacgacgagtggcttccgccacaatcgccgccgggttggagtagttaagcatccaggcgttcggcgaatatttttccatataatccaccagctccagcacgccgccgatagagcgcataccgtaggcgatcccgcccggtccgcaggtctcctggcccagcacgccgtggcgaagcgggattttctcatcctgttcacgcatcggatatttcccgacgcggatatgcgccatgacaaaatcaacatcggtaaacgccgcctgcggatcggtggtatagctgaactcaatctccggcgcctgctctttgaggatcactttgcacgcctcggcgatggtctcctggcgcgcgccgtcgttgtcataaaatttcagcgaccgcagcggaaaacgatcctggtttgccagcagcatcaggacaatgcccggggtgaaggtgctgccgccgcctgcgataacaactgagaattttttcatgatactgcctccgtcatggtggtatgttcggtcgaaagagaatctttcatcaggttttccagctggtcgcgcacctggggaacgtgcaggccgacgatgacctgaatcccgttgccgcggcgtactaccccgtgggcgcccagcgctttaaagacgtcgtcactttgcgttttcgccatatcgaccagcgcgatgcgcagtcgggtggcgcagttgttgatgctttcaatgttgtcggcgccgccgagggcctgcaggaagccagcggcctgacccagccgggtctctggcgcggcggcggccgtggttttacctcgtgccgcctggtaatcggccttgctgtagagcttgatttcgctctcttccctgccaggcgtcttcaggttcagacgcaggatcagggtacggaagactacgaagtagagggcggtgaaacagaggccgatgcctatctgaatgaacatcatcgaagcgtggtgatggaacatcgggatccagttttgcggcaagaattgatcgagcaggccgccgccgaagttgcccaccacgccgcagatgtacatcaccgtcgccatggtcgccgccagcaccgcgtgaacggcgaacaacagcggcgagatgaacaggaaggtgaactccagcggctcagtgatcccgaccagcatcgcggtcagggtggcggggatgagcagaccggcgaccttgacgcggttttccggcgcggcggtgaagtagagcgccagcgcaatccccaccgacccaaacactttcgagttaccgtgcagggcaaagccgccctccgggaacagcgtcttcagcggttccgtactctgactgaacgcctgcagatgctctgcccagtagacctgcagtccgccctccaccaccgccgggccaaagatgaacgggccatagacgaagtggtgcaggccggtggggatcaggatgcgctcaaggaagatgtaaacccacaccccaagcgccccggctgagcgcaggaaggcctgcagtgattcaatgcccagctggacctttggccagccgagcagggtcagccaggcgcaagggatcatcgcgaggaaggcgacaatgaccacaaacgatgaaccctgaaagatgccgaggaataccggcaggggtttatcgaaatagcgattgtgcagggccgtcaccagaccggagatgacgatggcgccgataatgctggtgtcgagggttttaatcccggcaatcatcgtcaggccgctgccggccgtgggttcagcggaaaaatcgacgccgaagaagtggccccaagtcatccccatggcgttgataaagtagttccaggtgagaaagctcaccagcaccgccagacaggcccggccctgggcctgtttcgccaggccgatcggcagaccgacggcgaaaatcagcggcatattacgaaagacggtccagccgccctcctcaatgatgtgaacgatctgggcaaacaggctgtcgggtgcggtcagcgcttcgccgacgaacatcgggttgcgcagcatgatggcgataccgaccacgatcccggcaaaaggaaacaacaaaaccggggtaaacatggcgccgccaaagcgttgtatttgactgagcattgggaaatcctcatgtaacaactcgtagggtgagtggccttctttttcttgattaccggcctgactggagaataaaaatttgcccgtccgacaacatgccgcgccgttgcgattcgtgatcccattcatggttttaatttggccaaagttgtctacttcggtaacaaaagttagacatcgataagtcaggcagcgaaattaactaaatgaatgtgtcttaattgattgtaattaatctatttttttagaaaaaagagcacaaagcgacatccccttttcctgcacaagaggactactggtgatctataaatccattgctgaccgcctgcggctgcggctgaattccgccgacttcgccatcggcagcccgctaccaggagagaaaaaactggccgaggagttcggggtggcgcgcatgactattcgcaaagccatcgatctgctggtggactggggattggttgtgcgtcgccacggctcgggaacttacgtggcgcgtaaagacgtccatcatgaaaccagcaatctgaccggcctggcggaagtgctgcgcaagcagggtaaagaggtggtgagtcaggtgctggccttcgaggtgatgcccgccccgccggccatcgccagtctgctgcggattaaaattgatgaacggatctacttctcacggcgggtgcgctacgtcgacggcaagccgctgatgctggaggatagctatatgccggtgaagctgttccgcaacctgtcgctgagtcatctggaagggtcgaaatttgattatattgagaaagagtgcgggatcatcatcagcgggaactatgaaacgctgacgccggtgctggcggacaagcagttggcgcgctcaatgaacgtcccggagcagacgccgctgctgcgtattacctccctttcctacagcgacagcggcgagtttcttaactattcggtcatgttccgcaacgccagcgagtatcaggtggactatcacctgcgccgcgtccaggcgcaaagcccgctagcttagcccccagaacagcacggcgagtagctgcggggtgataatgcgcaggaacatcaccagcggatagacggtggcatacgagagcgccgctgcgccgctggtggcgtgcaggttgttggcgaaggccagcgccggcgggtcggtcatggagccggccagcatgccgcacagcgtcagatagttcattttcgccagcatgcgcgcgaggacgcccaccgtcagcagcgggatggcggtgatgaaaataccgtaagcgatccagctcagaccatcgccctgggtcagggtggcgacaaagtcaccccccgattttagcccgaccaccgccagaaacagcacgatccccagctcgcgcagcgccaggttggcgctcggcggcataaaccagtacagcttgccgatactgccgatacgcccaaggatcagcgccataatcagcggcccaccggccagtcccagcttcaatgctgcagggaagccgggaataaacaacgggatagatcccagcagtaccccgagtccgatgccgataaacaccggcagcatctggacctgctgcagcttctgctgagcgttacccagttcggcggccacggcgtcaattgcctccggacggccgaccaggttgaggatgtcaccaaactgcaggctggcgctgctgctggctaccagctcgacgcctgcccggttaagccgggagatcactacgtcatagcgctgtttgacgtgcagatcgcgtattttctttcccagcactttttcgttagtgaccaccacccgctccactttcagatcggtgccgcgcgtcgacagcgaggtcgccacctcctggcctatcaccagctgcgcattgtgcaaatcctcaggtcgccccaccaggtgcagcaggtcgccagcctggataagggtgcccggcgcaggcaccatcaacagctcaccgcgtttcagccgcgaacagacgatgttgtcgttgttgagcatcggcacatcctgaatcgccatctggttgaggttggggttttccacccgcacgttgatggtgtgtaaatgggcgtggccgttaccgctgctctcctcaaaccgctgggcctctttctcgacattgatgcgaaagaacagacgcaccagccacatggtcagcagaatgccgcagatgccgaacggatacgccatcgcgtagctcatccccatttgatcgaccacctcgaacggtacgccgagatcgcgcagaatttgctgcccggcccccagcgctggcgtgttggtcaccgcaccggagaagataccgagcaccaccgggagaggaatattgaacagtttatgcagcaccgcggtcaccaggccgccgaggataacgataagaatagcgaacagattgagccgcaggccagagacccgcagcgaggcgaaaaagcccggccccacctgaataccgatggtgtagacaaacaggatcaagccgaattcctgaataaaatgcagcatcgggctgctgagggtgacccctgcctgatcgacaaagtggccgacaataatcccgccaaacaggacgccgccaatgccaaagccgacgccgcggattttgacattgccgatccacaaccccactaccgccaccagcgccagcacgctgaccgtcaatgctatctcactcatggtaccgtccctgtgaataacaccattaactacagggattatgaccgctgccaggtggattgtatgccgcctggcgcacaataatcatggagtaagatacgctactcaggcgcgttcttatttttcgctgcgatagtgagttgctgaatacttttctccggggaaggaagtgcttcaggcatagtgccacccaggtctttaatagtctggcgtactttttgccctacgtcataatgcgttttgttggcgagttgcttcgaatcaaccgcgtcccgacgtagtttttcttccgtttgggtagcacgaaacaggttggccgcgagctcagtcgatcccatatagtcgagtattttttggcttttctttaggcccttacgctcatggattgctttttggtcaagaccaccatagagacctttataaccatggttttgaaagacagcaaaatcaagagtcgtctcaacaccagcacgttgggccgtttcaaccagatgtttattatgctctttgagctcattgtgcaggaacagtcgcttttcatcctctcgtagagacttaaatatttgatcatcttgcaattcctggcgccgggtttgcaaggcaaagtacgtttgccccgcagcaatcaccggtttcgacggatcgccattttgcactaccagatagcaggcgtagcgtgagaggtggaaatcttcaagattcctgctggcgccagaacctaattcgaccattttgttggtttcaacaaaatggtctgccgagggatgaccactcgcctcacatgaaattatcgcttttgcaatgaccttataaaaattccgccactctttatagtcaagcaggggaccaaggttgcgggcagaccaatactcccgccccgcctcatcgctctttctaatcgcttcaaatggctgctgttcgttcataacgtatccttgtttgagtgagtcccaaagtatgattgttttttaaactgaaacacccgttgcagcaaggaagtttattgtgctctcgcacacaaaaaagccccgaaaatcggggccttataagttattcgcttaattaactatttaatgccggtcgttcgctgatggcgatacgctgcggggcgatctgctcaggctcattgcgggtcagatcgatatgcagcaggccattggtgaaggtcgcgccagagacctccatgttgtcggcgagggtgaagctcaggctgaaggcctggctcaccaacccctggtgcagccatgtggtctctttttccggctgctgcggcgtgcctttcaccaccagacgggtgccttccagttgaatatccagatcttcctgacggaaaccggccagcgcaagggtaatgcggtagtggttatcgtcgcttttttcgatgttatagggcgggaagctttggctttcaccggcggtttgcagggcgctggccagtttgtcaaaaccgatccattgacgcagcagggggataaatcgtagttacgcatactgttttctccttctaagaagcgagtgaatacctgcgaattctgtaaattcgcatctgctccctgacggcgagcaggttgttacatcaggccgccacgcggcctgaaacggacaattagttgatttcgatgcggcgcggcttgttcgcttccgggatcacccgttccagatcgatatacagcaggccgttcaccagattggcgccgcggacgtgaatgttttccgccagctggaatttgcgctcgaagttgcgctcggcgatcccctgatacaggtaggtccgctctttctgctcggcggcgtgggcgcctttgacgatcagcagattgtcctgggcagtgatctccagctcgctttcagcaaagccagccaccgcgatagcgatgcgatagtggttttcgtctaccagctcgacgttatacggagggtagccgccgttgctctggctttgattgttttccagtaggttgaacaggcggtcgaaaccaatggctgaacgatatagcggggaaagatcgaagttacgcatagtaaatagctcctgaaaatcagcgagaatcaaatgaccttccatcgtggacaggccgcggtaatccggaatacccctcaggcgtattctcagtgggttacacctataaaatgggtttctccccgtgcttttcaagggattgagggcaattttttttgcagtttatcgatgattgcttagactgggtggaggagcacaaaaagcaaagtgcgatgcccgccacagtgcggcgcaataacactatgcattcacgggatggcccgatataaccgctgaaaggttatctcaacgcccgaaacgacaatggaagaacaatgaaaagcagacgactgttaaagctggtcctgttcagcgggataataagcctgagcggttgctccagcgtaatgtcacataccggtggcaaagagggaacctatccgggcacgcgatccagtgcgcaaacgctgggggacagcgataccaactggggtgtgaaatcgctggtggcgctggacatgccgttcaccgccgtcatggataccctgctgctgccgtgggatatgttccgcaccgacagctcaatcaaatctcgggtcgaaaagagcgagaaggctacgctggcgaccaactcggtgatcccgccagcgccgatgcctgcccagtaagttatcgtccggtctgcgtaacccacagctgacgataaccgtccacctcctccatccaggcaatctgtttaccgtctggcgaaaagacgatcgcgtccgccgagggcgcatgcgtatcggttaaaaaggtgatatctcccgtaccggcatggcagcaggcaatccgatcctccagcgcaaaacccagccactctcccgacggatgccagttaaacgccgactggatacccgacgcgtgatgcgtcaactgccgcggctcgcccccctgcggggaaataagccacagctgcactacgccggcgtcgtcgcgcatcagaaaggctatcgccgtcgcctggggattggcgcgcacccagtggcgcgggacgttcaccagtcccgagtagcggcgatggtgggtgaaggtcaaacgacgctggctgacgcccgccggcggcgccagcattgtggttgcggtaccggccagcggcgccccgccaggctgcttccagccggcttcatcctgcggcagatcgacaataaacagctcaggcactttatcgccattttccgccagcgtatcgccaataaacgccagagtatggttcccgacccagccctcctcataggcgcgattaatctcatcgctgcccggcgcgggtgccggcgtcgtgcggcttaccagcacgcaccagtggctgccgccatattcgcgcggatgctgtccctgcggcgtcaccggtccatagggcgccgccacgccgacgttgcgcagatccagcgccggatcgcgctcgtgcagcacgtgatcgttgtaggtaaaactgacaaactgaccgttggggctatagacatggacgtggctgccgccgcgcagtgcgccgggcgtgtaggggggggtaatgtccatggcgtccagattctcgacagccccctgaaaggccaccaccccgcggcgatgatgaaaatcatactgccactgcgcatccggccgctcggggccatgaataaacacatagcgctcctgggttggatgcacggttaccacgcccacgtgcgcgccctgcgtggcacgataaatggtctccacagtaccgctgtttacgttcactcgctcaatggtttcgccggtaaacgatgcgccggacggacgaacgtcgaataccagccactggctgtcgggagtccaggtattaatattggtaagctggtgatgacggggagcaaaagtgacttgtttcatgacgataccctgatgcgagacttacgcatcagggtagcgtatcgcaaaaaattagcctacacgtttcacatcgccgaccagcaggatataagacagcgcgcctatcaacgccaccacggagatataaaccagcgccgggccaaagccgtaatcctgcgccagatagccaatcaccagcgggacggtgatgccgcccaggccgccaacaaagttaaacaccccgccggtcaggccgatcaggcgcatcggcgccagggaggagaccagcgaccaggtgatagacgcaaaaccgttaccgaagaacgccagcgccatcagcgccatgatccagatggggtcgttggtgtagtttgcccccatgatgcaggtggagatcaacagtccacagatgatcggcgttttgcgcgccacgcccagcgagtagccttttttcaccagcttatccgccagccaaccagacagcaggacgccaaaaaacgcggcgaggaagggcaccgtggtcataaagccggccttcagcgcggtgatgcctttttcctgggttaagtagttcggaaaccaggtcaggaagaaccacagcgtcgaggttaccgcgaactgtccaaggtaaacgccaaccagcttgcggtgaaaaaccagcttccagtccgctttcgataacggttgacgcgcctctttcttcagcggcgcatcgccatccaccaggccgccgccgtcgcggatatagtcgagttcggctttactgatgcttttagtcaggcgcggcggttgataaaccttgaaccagatcagcgaccagataatgccgataccgccggtaacgataaacacccagtgccagctcaatagctcctggatccaaatcagcagcggcgtgaggaaagccaggccaacaaattgccccgaggtataaaacccgacggcggaagcgcgctcgtgctccgggaaccagctggtcaccatgcggttgttggtcgggaaggctggcgcttcgaagatcccggtgatagcgcgcaggccaatgagcgacattaaaccggtggcgaagccttgtagcaacgtcgccaccgaccagccaaatatagcgataaagtaggtaagccgggatcccacgcggtcaaggaaccaaccgccagggatctggcagagggtatacagccaggcaaaggcggaaaatacgtagcccatttccgctttgctaataccaaactcctcctgaatatgcgccgaggcgacggcgaggttggcgcggtcaacataacaaataaccacggtaataaagatcatgatgagcgtcagataacggcggcgcccggtttttacagcggtaactgaaatatccatcgcaatctgtctccagattttgggcatagcgaagccgctcaccatgcccggtaatttacagagggtgtttttgttttttattaataactatgttgcgatgcgctaaataattcgcgctggggaaaggcggcaaattttcgcatccctgggagcatacaatagtatgtgacctgggtaagaaaatgcagccaacgcatcaccagtgcgaagtatgacgcgcatttaccattcggcgacagatccatcctcataccgccacaacggatttcgccagtccggcgcgtttttacttaactcaatcacgcgggcctcatcaatttccacgcccagccccggcttcatcagaggtttaaagaagccgccttccatattgaaatcttctttgtttttcacaaaatcaagcagttcggcgcctttgttgtagtggatccccatgctctgctcctggaagaccgcgttatgtgaaacgaaatcaacgtgcagacaagccgccagcgcgatcggccccagcgggcagtgcggcgccagcccaacgtcataggcttccgccatgccggcaattttatagcattcggtaataccgcctgcgtgcgacagatcgggttgtaaaatagccaccccgcccgcttccaggacccgtttaaattcaaagcgcgaaaacatacgttcgccggcggcaatgggaatatgggtttgcgccgccagccgcggataatattccgcctgctcggctaaggaaggtgcgaataagcaggtcatttcttcccaagctgactcgctgattaaaatttcgcggatctgggccgatttttttcccgcaaacacatcgaatcagcctatttaggctattttttccaccatttctggcgttatttccggtttttactgagatctctcccactgacgtatcatttggtccacccgaaacaggttggccagggtgaataacatcgccagttggttatcgtttttcagcagccctttgtatctggctttcacgaagccgaactgccgcttgatgatgcgaaacgggtgctccaccctggcacggatgctggctttcatgtattcgatgttgatggccgttttgttcttgcgcggatgctgcttcaaggtttttaccttgccgggacgctcggcgatcagccagtccacatccacctcggccagctcctcgcgctgtggcgctccttggtagccggcatcggctgagacaaattgctcctctccatgaagcagattacccagctgattgaggtcatgctcgttggccgcggtggtgactaggctgtgggtcaggccactcttggcatcgacaccaatgtgggccttcatgccaaagtgccactgattgcctttcttggtctgatgcatctccggatcgcgttgctgctctttgttcttggtagagctgggtgcctcaatgatggtggcatccaccaaagtgccttgggtcatcatgacgcctgcttcggccagccagcgattgatggtcttgaacaattgacgggccagttgatgctgctcgagcaggtggcggaaattcatgatggtggtgcgatccggcagggcgctatccagggataatcgggcaaacaggcgcatggaggcgatttcgtacagggcatcttccatggcaccgtcgctcaggttgtaccaatgctgcatgcagtgaatacgcagcatggtctccagcggatagggccgtcggccattgcccgccttgggataaaacggctcgatgacttccaccatgttttgccatggcagaatctgctccatgcgggagaggaaaatctcttttcgggtctgacggcgcttagtgctgaattcactatcggcgaaggtgagttgatggctcatgatgtccctctgggatgcgctccggatgaatatgatgatctcatatcaggaacttgttcgcaccttccctaataccggctcctcaataaataatgggcgatatggctccagctctttaattaataccttagccatcggcgcgctaacgcggccgtgaaaatcgagaccaaactcaatttcattgccaaacgcttcgcggatttgcgccacggtattcaccgcggcatcaaccgcgcgggaattatcaatgatacccatctcttcgcagccgtttaatttaaaggtgtcaaaaccaatgccgcgcagcttcttaatcccgtcaatcacttcggcggggcggtcgccgcccacccagctgtaggctttaattttgtcgcgcaccagcccgcccatcagttgccacactggggcattcaggaccttacctttaatatcccatagcgcctgatcaataccggcgatggcgctcatcataatcgggccgccgcgataaaagccgccgcggtacattacctgccacaggtcattaatccgcgccggatcctgaccaatcaggtaatcgccaaattcatgaacggctgcctccaccgtacgggcgcgcccttcaatcaccggttcgccccagccgacgatgccttcatcggtttcaatcttcaggaacatccaacgcggaggtaaacggtacgtggtgatattggttattttcatttcactgcctctcgatacgcttttacgaatgcggctgcctgctgcgcggtacgttcaaccggctggccggcacgatagagatcgctacccaatcctgccccaacacagccggcattaatccactgcgccaggttttccggcgtcacgccgccaacggcaaagaccggaacctcgggcggaagcacggctttcaacgctttgatgtaatccgggccaaaagccgatgacgggaagattttcagagcctgcgcgccggcatcgagcgcgctaaaggcttcgctggcggtggcgcagcctggacacacggtcatgccgtaacccaccgctcgccggatcacttccggttgaatgtttggcgtcacaatcagccgacagtccatggccgccagcctgtcgacctgctccggttgcagcaccgtgcccgcgccgataagcgcctgctcgccgtaagcgtcgacgacctgcggaatacttttctcccactgcggcgagttcagcgggatttcgaccgcgtcgaaaccggcgtcgataacggcgccaacgtgagccagcgcctcgtctggcgtaataccgcgcaggatagcgataagtggaaggttagtttgccactgcataagcgatgctccttattcctgtctgaaatgccgtatcgcccgcaaccgcgctgacttcgcggccaatggcggcgaatgcctgctgatagcgggatgttaacgatgacccagcgacgagactgatcgcctgctgtccggcgaatgtgtcgctgagggtggcaacttcagcgccaatcagcaggccggaaagaaattcgctaacctgctcgcgaggcagcgcgcccagcacgtgcgaagcgcgaacttcaaacagctgcggcaggacggcggggttgttgataccgcgctgcagacctgccgcgaatgcggcagcggacgtttcctgcggcggtaagccggcgcccaccagcgagtgctgaagcaacaaatgatgcaattcaccggtcaaaacagtacgaaaatcgtgaatttgccggcgatcggccagtacccacttacagtgggttcccggcatcacgtagacagatgaaggggctaaggcgcgtgcgcccagcagctgcgtttcttccccacgcatgacgttatggttatcgtcacgggaaacgcaaaggccgggaattatccagatattgtcgccaacggcagttaactgctggccaatatccgagaaagcggcaggaagcggcaaataaggggcgattttccagcccacgttgctgccgaccatccctgccatcaccaccggtgtggcgccatcgcgccagtgctgggtgatttccgctaacaccgcagcgggagagcgaccattcaggcgcgttacgcctgcttcagattgcctgctttccaggcattcttcgccctgataaagccaggcgcgtaaattcgtcgatccccaatctattgcgatgtagcgagccgtcatgtgatttccttaagccttcgtgtcgagctggcgatcatcgtcaacgccgcctgctccgccgcgtcgctatcctgatgccgaatggcgtcaaatagcgctttatgttcctggagggttttcggcatgttgccttcatcgcccatccaggtccgttcaaataccgcccgctgcagcgaactgatcgccacgctaagctgctgcaaaaccgggttatgtactgactgcagcaccgcctcgtggtagcgaatatccgcttcgttaaaggcatcccggttttggttgttggcgatcatgtcattgagcgccgactcgatttccgccagatcgcttgaggtggcgcgttccgccgcccaacgcgcgatggcgggttcaaccaggttgcgcacttcactcatcgcgctgataagacgcgggtcatagtcattttccagtacccactgcagcacctcggtgtcgaggtagttccactggtttctgggagcgacaaacgcgccgcgatagcgcttcatttcaatcagccgcttcgccatcagggaacgaaacacttcgcggatgatgttgcgcgaggtttcaaactcctcacagagttccgcttcggccggaagcgccgaacccgggacgtatttaccgctgacgatctgtttgcccagcgagatcacaatgcgatcggtcttattgagagtcatggagagtccttgtgctctatgtgtactgctctactttaccgtcgctgctgaatttcgcctcatgtttgtactactaacgtgatgctgtacgttatcaacatgagcgtaatgtagtacaacattattgtgttgtactacaatttggatcacaaaaagaacaattcatgaaaattaaagcgcagcggccctgacaagaggcgataagagagaaaattaaggggaggaggcgttaaaacgcttcgccgacctggaagtaaaagccgctgctgccattgccgataccgtagtcgaggcgaacattaacgcgaggtttgaattcaaagcggtagccaacgcccgccgaaggcagccagcggccattattcagcgacgacagtgagggccccatggttcccgccccggcccaggcgacaatcccgtgccgccaggtgagctgccggcggtattccagctggccgctgacgacctttttatcccggtagcgcccctggtagtagccgcgcatccgttcatcgctgccgagcagcggcatcatgctccacggtacctcgccctgggtgaaggcgccatcggcctcccaggcgagcacgcttttctcgctcagggcatgataatggctatagtgcagctgaaattcctcaaagcgggtatcgctacctaatccgggcgcatagtgggtatagcggaggttggcatactgaccccggcgcgggttagggacaaagtcgcgatcgtcccagttgatatcgatgctggcgccggagctgaataccgacggtccctgtggagtgttttctatcttcggccgatcgtcatggtccatctcatcggcattctgcgccgccagcgaccatcccgccccgagataaacatgatcgataagctgccgataaagggtgggtcgcagggtcagtacctgggcggtatacttctctttttcattgtctttatccccggcatgaaaaccctgcccccaataataagtgggcgtgttggctatcgacccgtcgacaaaaacgcgccacagatcacgatcgaaaaaggtgtagtttttcacgctgaggccaaaggcgccggtagagctggcgtagccgctgagcgtcagggtcgagttctggctggtggtatcctgcgggtcgggacgatacaggccgacgacagcggtgccaatgcccaaccctagttccggcgtatagaacggaccgggcatcacgccccagtcgatgcctttgctggcgtcgaacttatcgctggcgccgagatgctgcagccagccgtcgattttctcgcggctgagcgcctcggcctggctgcctgtcgggcagaccatcagcagcagaaaagtgataaacagtcggctcaaaagcgatactcgccggcaataaagaaactgttacgttcggcaaagccaaactcggtagtaatattaaaattctgcgtcagctcgtattgcgcgcccaccagaacgttccatggcgactgcagatgctgcttcacatcgaagcgaccgttattgtcctggttggccagattaaccatattctgcagcatcggcgacggcatcgagagatcgctgaggctgcctttaaactcctgctgcacatcctgatacatgctgccaacccacagatttagctttccggcggggagatgcagcgcatcgaccgatggcgtactgaaacgatagccaacgcgcggcgaaaaggtaagcgcatcgatgctgccgtcgaggatatcaaagcgcgtttgcgtgtagttggcgtccagcacggtaaaccaattgccgacgccgcccaccagggtggtgcccatcccgtaggtagtacctttaaaatcgagacgaaagtcgagatcctgcatccccggcaggggcaccactttaccgttcggtcccttcaggccgacagctatctgcgaaattgaatgcccttcggtgtgccccaccaggccataaacgttcataaacggcagcagccaggcatccagcttgagcgtctcggttttgctgctttcccgcgtatgaccaacgccaatctggaaagcgttatccagcgagaccggcccattagcgaaaatgttattcacggcgtgcttgcagacaggatccttaccgcaatcgatattgcggccatccagcgacagcccggtgaagttaatgctgtcgacattaatattctgccgcatatccatatagttaatgctgacgccaaacggcagcggcaggacgtagccgcgctttctggcctcatcgcctagcaaagggagtagcgaggacgatgctgcggccgcaggctggcgactttctggcgccggcagatccgcaggctctgcgccgtgataggcatacgccggttcgagcggcgccgttggttccgcggccgcgcaaatctgaacagaggcgaatggcagcgtaaccaacatcaaacggtggtatatattcatgaaaagtatgatgttagttctgagttgctaaaaagagggcgggtagcttatagaatcccctgcaaggattgagggatttaaatgcggattaacatctgttcatgaaaaaagagaagacagacccggcgaacgccgggccggaaagaagtttacgctaaaacgtatttttcaatggcgaaggcaacgccatcttcaaggttcgatttggtgatgaagttcgccgcttctttgaccgcaggaatggcgttatccattgccacgccgacgccggcaaattcaatcatcgcgatatcattttcctgatcgccaatcgccataatctcttccggcttgatgcccagcgcatcggccagcgacttcacgccagtgcctttattgacgcgtttatccagtatttcgaggaagtaaggcgcacttttcagcacggtgtacttctctttcacttccgccggaatacgggcgatggcctggtcaaggattgccggctcatcaatcatcatcacttttagcagctggatctcaggatccattttctccgcttcgcagaacaccagcggaatggttgccacataggattcgtggacggtgtagtagctgatatcgcggttcgcggtatacagcgtattgcgatccagcgcatggaagtgggagccgacctcgcgggagagctgctcaaggaagcgatagtcgtcatagctcagcgcggtttgcgcgacggtgcttccgtcaccagccttctgcaccagcgcgccattgtaggtaatgcagtaatcacccggctgctccatatgcagctctttcaaatagctgtggacgccagcgtaagggcgaccggtggtcagcaccacgttaacaccgcgctcgcgcgccgcggcgatggcggctttcaccgctggagagatggtatggtcgggcagcagcagcgtgccgtccatatcgattgcaatcagtttaatagccatagggtccccgggtaagatgagtctcccctcatgctaacgcgattccgctcaaaaaacagtaaaagtgtcggccagaaagggggatggaaccacagcagcggattcctcttttagcggcaaaagaaaagcccgatcgcgcgatgcgaccgggcttatacatcctgttgccccggtaaaactcgttaccgggaaacatgcggcttaaatatcgatattcgccgctttcagggcattctcttcgataaacgcgcgacgcggctcaacggcatcacccatcagggtggtgaacagctgatcggcagcgatggcatccttgacggtcacgcgcagcatgcgacggctgtccggatccatggtggtttcccacagctgatccgggttcatctcgcccagacctttatagcgctggatggagagaccgcgacgggactctttcaccagccagtccagggcctgctcgaagctggctaccggctgacgacgttcgccgcgctcgatgtaagcatcttcttccatcaggccgcgcagtttctcgcccagggcacaaatacgacgatattccggccccataatgaactcgttatccagcggatagtcggtatccacgccgtgggtacgtacgcgaataaccggctcaaaatgctgcagttctttgttctcgtggagatcgaatttccactggctgccgtgctgttctttctcgttcagctcggagaccagggtgttcacccagcgggtcaccttctgctcgtccgccaggtcggcctcggtcagggtcggctgatagataagctctttcagcagcgctttcgggaagcggcgctccatgcggccaatcattttctgggtggcattgaactcggcaaccagtttttccagcggttcgcccgccagcgccggcgcattggcgttggtgtgcagggtcgcaccgtcgagcgcgatggagatctgatactgatccatcgcttcgtcgtctttaatgtactgttcctgcttgcctttcttcactttgtacagcggcggctgggcaatgtagacgtggccgcgctcgacgatctccggcatctgacgatagaagaaggtcaacagcagggtacgaatgtgcgagccgtcgacgtccgcatcggtcatgatgatgatgctgtggtagcgcagtttatccggattgtactcatcgcgaccgataccgcagcccagcgcggtgatcagcgtcgccacttcctgggaagagagcattttatcgaagcgggctttctcaacgttaaggattttacccttcagcggcaggatcgcctggttcttgcggttacgaccctgtttagcagagccgcccgcggagtccccttccaccaggtacagttcggacagcgccgggtcgcgctcctggcaatccgccagtttgcccggcaggcctgccagatccagcgcgcctttacgacgagtcatctcacgagcgcgacgtgcggcctcacgggcgcgcgcggcgtcaataattttgccgaccacgattttcgcatcggatggattttccagcaggtattcgctcagcagttcgttcatctgctgctccaccgccgatttcacctcggaggagaccagcttgtctttggtctgcgaggagaatttcggatccggcaccttcacggataccacggcaatcaggccttcacgcgcatcgtcgccggtggcgctgactttcgcttttttgctatagccctctttgtccatataggcgttaagagtacgggtcatcgccgcgcggaagccggcgaggtgagtaccgccgtcacgctgcggaatgttgttggtaaagcagtagatgttttcctggaagccgtcgttccactgcagggccacttccacgccgataccgtctttttcggtggagaaatagaaaatattcgggtggatcggcgttttgttcttgttgagatactcaacgaacgccttgatgccgccttcgtagtggaaatggtcttctttgccgtcgcgcttatcgcgcaggcggatagagacgccggagttcaggaacgacagctcgcgcaggcgtttcgccaggatgtcatattcaaattcggtgacattggtgaaggtttccaggcttggccagaaacgcaccatggtgccggttttgtcggtttcgccagtcacggccagcggtgcctgcggcacaccgtgttcgtacatctgcttgtgaactttgttatcgcgctggataaccagctccagcttctgcgacagggcgttaaccaccgagacgcctacgccgtgcagaccgccggaaactttataggagttatcatcgaatttaccgccagcgtgcaggacggtcatgataacttccgctgcggagacgccctcttccgggtgaatgccggtcgggatgccgcggccgtcatcctggacggagacggagttatcgctgtggatggtgacaacgatatctttgcagtaacccgcgagcgcttcgtcgatagcgttatccacaacctcgaataccatgtggtgcagaccggtgccgtcatccgtgtcgccgatatacatacccgggcgcttacgcaccgcatccagccctttcaggactttgatactggaggagtcataagaattcgacatcaacgtttctcgctcatttaatcttgggttaatccgttattttacctttttccacgcggaacatcttcgaatttttgtccgacatgtccataacgtgttcagcgctgatcgcgctgacgaaaacctgcgactgcgtcgctttcaggcggctggataacagaccgcggcgggcatcatcaagttccgaggcaaaatcatctatcaggtacaggcagcgccgcccgctgacgcgggtgaggaactctccttgcgccagacgcagggcgcacatcagcagcttaagctgcccgcgcgacaaggtatcttccaccggcgctccgtcggcgcgaatgcgaaaatccgctttatgcgggccgtgggcggtgtaggttaacattctgtcgcgctcgaaattccgctccagcacctccgcgtagtcggtctctttttcccagccgcgctggaaagagaaggtgagcgtgaattccggtaaaaattgctgacaggtatccgccatgtcttcgacgatagcggcgctgtattcggcacgccagcggctgatctgctccgccagcgggattaattccagatcccaaggccgcagctgggcatagcggctgacctgacgcagcgcggcgttgcgctgcttgaccaggcgcttcaggttgctccaggcggtgaagaatccggcttcgttatgaaagcatccccagtcaaggaatgctcttctgtatttggggccgccgttgagtaaagtaaacccctccggcgtaatcagctgcatcggcatcaggtgcgccagctccgccactttgtggccgtcggtgccgtcgatacgcaccttgctgtcgccctgtttgtctttggtcaggccgatggcggtttcccgctcttcgccctgtaaacgcccatgcagaacaaacgcatcctgctcgtggcggatcactcggccaatttgcaaactgcgaaatgcccggccgtggccaagcgtgtagatagcttccagcacgctggttttgccgctgccgttcgcgccaaccaggaagttaaagccgggagataaagcgagatccgcgctttcaatattgcggaagtctttgatgagcaagcgcgtcagtgacatatcagcgttctttgggccagggcgttatcggcgcagccagtttcaacgcggactgcgcgcagaccctggagcgtacacaaagtacgtgacaggggcgagcacagcccaggttgaaaatggcaagtaagatagcccgatattttccactacaatctcataggcatgacgacataggctgcggattgagaggccgcatcctcaatctgcacgctcgacaccgaatccgtcagcagaatgcgtacattctcgcacttcagcgcattcagcacatccagcacatagctaacgttgaagccaatctccatctccgttccggcgtaggtcacatccagaatctcttccgcttcttcctgttccgggttattggcggtgattttcagctggttttcgctaacgtacagccgcacgccgcggaatttctcgttggagagaatcgccgcgcgcgcaaaagcctgcttcagaatatcgcagcccgcttcgaggtgtttatccggatttttcggcaatacgcggcgataatccgggaaacggccatcaaccagcttagaggtgaagataaaatcgccaacgtgggcgcggatattgttgctgccaatctgcacgcgcagcgggatatccccgccgtcgagcatccgcatcagctcaatcacccctttacgcggcacgatcaccgaatggttcggcagcgacgcttccagcggcatcgaacagaccgccaggcggtgaccatcggtggccaccgtgcgcagttcgctgccttcggtttcaaacagcatgccgtttaagtagtaacgaacatcctggtgcgccatcgagaactgggtggcttcgatcagacgcttcatggtcgcctgcggcagggtaaactccacttcactctgccagtcatccagattcgggaaatcggcggcgggcagggtcgacagcgagaagcggctgcggccggaacgcaccagcatgcgatcgccttccaactgaaccgcgatctccgcgccttccggcaggccgcggcagatatcaaagaatttccgtgccggaacggtcgttgcgcccgcttcgtgcggctgaaccagcgccacgcgcgccaccatctccatttcaagatcggtaccggtcagcgacagcgcgccctccgcgacctgaagcagcaggttaccgagaatgggcagcgtcggacgaccacctaacggaccgctcacctgttgcagcggttttaataaatgttcacgttctacggtaaatttcatagcgtcacgaggataatgttctgattaaattggaaaaatcttctttaatgtcgtggctttcttcacgcagctgctcaatcttgcggcaggcgtgcagcacggtggtatggtctcggccgccaaacgcatcgccgatttccggcaggctgtggttggtcagctctttggccagcgccatcgccatctggcgaggacgcgccaccgaacgggagcggcgtttggacagcagatccgctaccttaatcttgtagtactccgccaccgtcttttgaatattgtcgatggtgaccagtttttcctgcagcgccagcagatcgcgcagcgcttcgcgcacgaaatcgatggtgatcgcccggccggtgaagttggcgttggcgataacgcgattcagcgccccctccagctcacgcacgttcgagcgcagacgcttggcaataaagaacgccacttcgcccggcaggcggatgtcgttctcgtcggcttttttcatcaggatcgcgacgcgggtttccagctccggcggctcgatcgccaccgtcagcccccagccgaagcgggattttagacgatcctcaacgccgttgatctcttttggataacgatccgacgtcaggatgatctgctgattaccttccagcagcgcattgaaggtgtggaaaaactcttcctgggatcgttctttattggcaaagaactgaatgtcatcgatcagcagggcgtcaacggagcggtagtaacgcttaaactcttcgatggcgttgttctgcagcgctttaaccatgtcctgaacgaaacgctcggagtgcatatagaccactttcgcgttcggcttacgcgccacaatgccgttccccaccgcgtgcagcaggtgagttttacccagacccgtcccgccatagaggaacagggggttgtaggcgccgcccgggttatccgccacctgacgcgccgccgcgcgggccagctggttagatttaccttcgacgaagttatcaaacgtgtgtttcacgttaacgttagagcggtaggtcggctccgccggcgccgggacattatcccagccagggcgcacgatcgtcggcgccgcgcgcgcggtctgcacctgcgccgccggaatggccgccgcagccgggcttaccgcccctttctgcagcgagctggcgggcttagcgcccacctcaaaacgcagctgcggggcgtccgcaccgcaaaaatcattgaggagtccattgatattattgaggtatttgtcccttacccagtcgagcacaaaacggtttggcgcatacagtgccagcgtgttatcgctcagttccgcctgcaatgggcggatccacatgctgaattctgtggctggtaactcatcctgcaatcgggcaagacactgctgccaaagcgaaagtgacacggcggactccactcgaacataaaatcgatatcaaagaaaaactgaaacaatcgtgattgttggcacacgtcgacaagaccctgcattagccgaaaagcccctgcacaaaaggggtgacgtgcgaaccgctatctgcggttattacccgctgcggatccggggatcgcgatcgggaccggggatcatagcctaaactgagaaagagatcttgtgtttctcaacagattcttcccgatttatccacaggaaggatcgaaaccgggtaagtgtaatcgatcctgcggggagtgaagcacgatttccgccgcatattggaaaaattaatgagctatgccgcttttgggcggaaacgatctaataaagatccttgtggatccttgcgctttactggccaggccgtataatcccccacccggcgcgtaatgcccgttttcgtcacgcgtctcagcttattttttgtgcgacgaggtgcgagaaataaggaaagagaattgactccggagtgtacaattattacaatccggcctctttaatcacccacgctgaggcgtaagccgttcgaagttcgttcgggtctacgcaaaagtcagtgaatttattcaagtttaggtagaaatcgccatgaaacgcacttttcaaccgtctgtactgaagcgcaaccgttctcacggcttccgtgctcgtatggctactaaaaatggtcgtcaggttctggcacgtcgtcgtgctaaaggccgcgctcgtctgaccgtttccaagtaataaagctaaccctgcgtggttaagctcgcatttcccagggagttacgcttgttaactcccagtcatttcactttcgtcttccagcagccacaacgggctggcacgccgcaaatcaccatcctcggccgcctgaattcgctggggcatccccgcatcggtctcaccgtcgccaagaaaaacgtgaaacgcgcacatgaacgcaatcggattaaacgtctgacgcgtgaaagttttcgtttgcgtcaacatgaactcccgccaatggatttcgtggtggtggcgaaaagaggggttgccgacctcgataaccgtgctctctcggaagcgttggaaaaattatggcgccgccattgtcgcctggctcgcgggtcctgatcggcctgattcgagtttatcagcgcctgattagtccgctactcgggccgcattgtcgtttcaccccaacctgttctcaatacggaattgaggccttacgcaggtttggagtgataaaaggcagttggttgacgatgaaacgcgtattaaaatgccaccctttacaccctggtggtgacgatcccgtcccgcctggaccatttgataccagagaacactaacgatggattcgcaacgcaatcttcttatcatcgctttgttgttcgtgtctttcatgatctggcaagcctgggagcaggacaaaaatccgcagccccagcagcagaccacgcagactacgaccacagcagcgggtagcgccgccgaccagggcgtaccggccagtggccaggggaaactgattacggttaaaaccgacgtgcttgagctgactatcaacaccaacggtggcgatattgagcaggcgctgcttctggcgtatccaaaaacgctgaaatcgaccgaaccgttccagttactggaaaccacgccgcagtttgtctaccaggcgcagagcggcttaaccggccgtgacggtccggataacccggcaaacggcccgcgtccgctgtacaacgtcgataaagaggcgtttgtgttggccgatggccaggatgagctcgttatcccgctgacctacactgacaaagccggcaacgtcttcaccaaaaccttcaccctgaagcgcggtggctatgcggtgaacgtgggttacagcgtgcagaatgccagcgagaagcctctggaagtctcgaccttcggtcagctgaagcagaccgctgcgctgccgaccagtcgcgatacgcagaccggtggcctgtccacgatgcatactttccgtggcgccgcgttctccactgcggattcgaaatacgaaaaatataaattcgataccattctggataacgaaaacctgaacgtcagcaccaaaaacggttgggttgccatgctgcagcagtacttcaccaccgcatgggtgccgcggaataacgggacgaataacttctacaccgccaacctcggcaacggcattgtcgctattggctacaaatcgcagccggtactggtgcagccaggccagaccgacaaactgcagagcacgctgtgggtcggcccggctattcaggacaaaatggctgccgttgcgccgcacctggatctgaccgtcgactacggctggctgtggttcatctcccaaccgctgttcaagctgctgaaattcatccacagcttcctcggcaactggggcttctcgatcatcgttatcacctttatcgttcgtggcatcatgtacccgctgaccaaagcgcagtacacctccatggcgaagatgcgcatgctgcagccgaagattcaggccatgcgtgagcgtctgggcgacgataaacaacgtcaaagccaggagatgatggcgctgtataaagcggaaaaagtaaacccgctgggcggctgcttcccgctgattattcagatgccgatcttccttgcgctgtactacatgctgagcgcctcggttgaactgcgtcatgcgccgtttatcctgtggatccacgacctgtctgctcaggacccgtactacatcctgccgatcatcatgggcgcgaccatgttcttcatccagaagatgtcgccgaccaccgtgaccgacccgatgcagcagaagatcatgacctttatgccggtcatcttcacggtgttcttcctgtggttcccgtctggcctggtggtgtactacatcgtcagcaacctggtcaccattattcagcagcagctgatttaccgtggtctggagaaacgtggcctgcatagccgcgagaagaagaaatcctgatactcttcattcttcaagccgcagatgcgttggcttcattagttcgccccagtcacttactacagtaagctcctggggcctcactaacttgccgcctttctgcaacttgaattatttcgagtatctacggtagcgttaatgccagagaaggcggtcaatggaccgccttttttacatctacatagagagtcaccatgagccataacgacactatcgtcgcccaggcaacccctccgggacgcgggggtgtgggcatcctgcgtatctccggccttaaggcgcgcgacgtcgcgcaggcggtgctgggcaagctgccgaagccgcgctatgccgactacctgccgttcaacgacgttgacggtaccccgctggatcaggggattgcgctgtggttccccgggccgaactcctttaccggggaagatgtgcttgagctgcagggccacggcggcccggtcattctcgacctgctgcttaaacgtattctgaccctgccgggcctgcgcatcgccaggccgggtgagttttccgagcgcgcgttcctcaacgacaagctcgatctggcgcaggcagaggccatcgccgaccttatcgacgccagttcagagcaggcggcgcgctcggcgctgaattcgctgcagggggcgttctccgcgcgggtgaatcatcttgtggaagcgctcactcacctgcgcatctacgtggaagcggccattgacttcccggatgaagaaatcgatttcctttccgacggcaaaattgaagcccagctgaacgaggtgatggccgatctcgacgccgtccgcgcggaagctcgtcagggcagcctgctgcgcgaagggatgaaagtggtgatcgccgggcggccaaatgccggtaaatcaagcctgctgaacgccctggcgggccgcgaagcggcgatcgtcaccgatatcgccggtaccacccgcgacgtgctacgcgagcatatccatatcgacggcatgccgctgcatatcatcgataccgcaggcctgcgcgatgctaatgacgaagtggaacgtatcggcatcgagcgcgcctggcaggagattgcccaggccgatcgggtgctgtttatggtcgatggcaccaccaccggcgccgttgacccggcggagatctggccagactttatcgagcgcctgcccgctaaattgccgattaccgtggtgcgcaataaagccgatgtcaccggcgaagcgctcggtatcagcgaagtaaatggccactcacttattcgcctgtcggcacgtaccggcgaaggcgtggaggtgctacgtaaccacctcaagcagagcatgggcttcgataccaatatggaaggcggcttcctcgcccgccgccgtcacctgcaggccctggaagaggcggcgaaccatctgcagcaaggcaaagcccagctgctgggcgcctgggccggcgagctgctggcggaagagctgcgcctcgcgcagcaggcgctgagcgagatcaccggggagttcacttccgacgatctgctgggccgcatcttctccagcttctgtatcggcaaataacgtttagtccgtaaacgttcactcacccgcattaacgccgcgttaatgcgggttttttcttgccctttgcggcgcaacgttctctacttttatctccccctctgccgcgagactaaaacatgaccgttgaatataccgtgatcgagaaggtgccctccgccgaagcgttttgccacctgcgggtagccgccggcatgtcgccgcgccccctggaaggcgccagagccggactgccgcatagctgttatggcgtacatatcctctggcaggagacgccgatcgcgatgggacgcatcgtcggcgacggagcgattaatttcgatattgtcgacgtcgccgtcgatccggctcaccagggaaaaggccttggccggctggtgatggagaagctggtcgcctggctggacgctaacgcctttgatggcgcctacgttacgctggtggcggatgtgccggaactgtacgcgaagttcggcttcgaaagcgttcgcccggagagcgaggggatggcccgcgtctggcgaacccgcagtcgttagctcgcatttcctgccaggaaaagagcgttgtccaaatggcaactcgtcttacggcgcgttcctcactatgctgaacgccattcacatcgcgaggatcccatgacacgctttcttctctgcagctttgccctggttctgctctacccctccggcatcgatatgtatctggtcggcctgccgcgtattgctcaggacctgggggccagcgaggcgcaattacatatcgccttctcggtctatctggccggtatggcctccgcgatgctgtttgctggccgcatcgccgaccgctcggggcgtaagcctgtcgctattgtaggtgcagcgatctttgttatcgcctccctgctctgcgcccaggcgcataccagcagccacttcctcatcggacgctttatccaggggatcggcgccggcagctgctacgtggtggctttcgctatcctgcgcgatacgctggacgaccgtcgccgcgccaaggtgctgtcgttgctcaacggcatcacctgcattatccccgtcctggcgccggtgcttggccacctgattatgctgaaatatccgtggcagagcctgttctacacgatgaccggcatgggcgtcatggtcgctgtgctgtcggtctttatcctgcgtgaaacgcggccgacggcgcctccgcaggcagcgtcaccgcagcatgacgctggcgaatcgctgttgaaccgctttttcctcagccgcttactcattaccaccctcagcgtgacggtgatcctgacctacgttaacgtctcgccggtactaatgatggaagagatggggttcgaccggggaacttactcaatggcgatggctctgatggcgatgatcagcatggcggtctccttctcaacgccgttcgccctgtcgctgtttaatccccgcaccttaatgctgacctcacaggtgctgtttctggcggcaggcgtgacgctgagcctcgcgactcgccaggccgtcaccctgatcgggctgggcatgatttgcgccggcttctccgttgggttcggcgtcgcgatgagccaggcgctggggccgttcacgctgcgcgcgggcgtcgccagctcggtcctcggcatcgcgcaggtgtgcggttcatcgctgtggatttggctcgccgccatcatcggactcagcgcaatgaatatgctgatcgggatactcattgcctgtagcatagtgagccttgttttgttactggtcgtcaccccgccgcgggttgcgcaatacgatgaagaagccgctgtcgagtcttgatcttaatttactcctctgcctgcagctcctgacccaggagctcagcgttacccgtacggcgaagcggatgaacgtttcgccgtcagcggtgagcaagtcgctggccaaactgcgcgcctggtttgacgatccgctgtttgtgaaaaccccgctgggcctggcgcccacgccgctggtcagcagcatggagcaggatctggcggactggatgcagatgggcaaccaaatcctcgataaaccgcaccataccatgcccagcggcctcaaattcgaactggcggcggaaacgccgctgctgatgatcctgtttaacaccctctctcagcgcatctatcagcgctatccgcaggcattgattcgtttgcgcaactgggactacgactccctggacgccatcatccgcggtgaggtggatatcggcttctgcggacgcgaaagccatccgcagtcgcgtgagctgctgagcctgctgccgtggtatatcgattttgaggtgctgttcaccgacctgccgcaggtctggctgcgcgccgatcatccggcgctcagggaagagtgggatctggcggcattcttacgctatccgcatatcactatctgctgggaacaacgcgatacctgggccctggacgacgtgctgcaggagctggggtataagcgtaacgtggcgctgaccgtgccggggtttgagcaatcactttttatggccgctcagccgcagcacaccatgctggccaccgcgccgcgctactgtcagcactataatcagcagcaccagctgccgctcgtctcccggccgctccccctggaggcgcagcatctggaaaagctgcgcgttcccttcaccctgctatggcataagcgcaacagctacaacccgaagcttgtctggcttagagatacgctgaaagcgctctattccggtacgctttaagccttgtttcgtgcccatagcaccttatttgcgcaagaatttgtaaaattcaaacaaattcccttttcaatgggggatttcggcattaaaacctgttaataccaggcgataatagcgcccgcagttttatccagaccattactcacggagcgacgtatggcaacgcattttgcaagagggatactcagtaccggggagccgctatcgacacgtttgtcagcggcctgtcatcaatccgcacgtcttctcccgacatatcgccaggctcgcttttgcgcgtcgcgctcgctgcttgccgagctgctgtttatgctttacggcatcagcgagctgcctgaaatcatcaacgaagcgaatggccgaccggtttttagcgatcgccaactgccccgcttttcgatcgcttatactggcaatatcgttggtgttgccctcaccaccgagggggattgtggcctcgacatggaactgcagcgcactgtccgcagccacgacgccgaccggcacaatttcagcaacaatgagaatctgtggattaacatacagcatgacccggacgaagcgcgcagccagctggtagcgctgcgccgcagcgtgctaaagctgaccggcgaagcatcaacgcagctgcagctgctgcccggctctggccgcctgcgcaccgccggcagtcagccaatcgaagcggtatgtgacgccgaatcgctgctggtatggtccattgccgctaccccgaacatcggctcgctgaaggtctgggaatatgatgctaagggaggtgactggcgcagcctggcagatgcgcagcagcgcgcacgcgaaccgtcagcccgcctgatgcgctttaccagcttacccatggaaaaaaccttatccctcaattgaccggtcttgccggcatcatgatccaaaggagcaatcatgtcagataccttgaaagtggttacgttactcggcagcctgcgtaaagggtcgtttaatggaatggtcgcgcgcaccctgcccggcatcgcgccagcgggcatggatatctccgcgctgccgtcgatcggtgatatcccgctgtacgatgctgatatgcaggaggaagaaggttttccgcagcgcgtgcaggagattgcgcaacagatccgcgaggcggatggggtagtgatagtcactccagaatataactattccgtgcctggcggcctgaaaaacgccatcgactggctgtcacgcctgcccgagcagccgctgtccggcaaaccggtactgattcagaccagctcaatgggcgccatcggcggtgcgcgctgccagtatcatctgcggcagattctggtcttccttgatgcgatggtaatgaataaaccggaatttatgggcggcgtcatccagaacaaagtggatccgcaggcgggtgaagtggtcgatcaaagcaccctcgaccatctgcgcggccaactgaccgctttcggcgactatattcggcgggttaaagcataaaaaaagcccggcagcgatgccgggctttttcatcatgcgtgcggattaatgtgcatcgataaagacaattttcagcacgaacagcagcgaaacgataatcacacacgggctgagctcgcgcagccggccggtaccgatcttcatcacgcagtaagagataaagcccagggcgataccttcggtgatcgagaagctaaacggcatcatcactgcggtgatgaacgcaggcaccgcctcggtcaggtcgctccacttcacgcgcgcgaggctggaggtcatcagcacgccaacgtatatcagcgcgcccgcggcggcatagccaggaaccatccccgccagcggagagaggaaaataaccagcaggaacaggataccaacgacaacggcggtcaggccggtacgcccgcccacggaaacgccggaagaagattcgatataggccgtcaccgacgaggtaccgatgaaggagcccgccaccgacgagacgctatcgacaaacagcgcttgcttcatgcgcgggaatttaccgttggcatccgcgagacccgctttatccgtcacgccaatcagcgtcccggaggagtcaaacaggttgaccagcataaaggagaagatcacgccggccaggcccaggttcagggagcccgccagatcgacctgaccaatcaccgaagccacgctcggcggcgccgagacgatcccggtgtaatgcacgtcgcccagcatccagcccagcagggtggtcacaacgatagagaccagtaccgcggcgtgaatgttgcgcgacgccagaatcgcgatgataaagaagcccagcacgcccagcagtacgctgtgggaagtcaaatgaccaatgctgaccagcgtttccggattggcgacaatcaccccggcgtttttcaggcccatcatgccgataaacaggccgataccgctggtgatacctacacgcaggctaagcggaatattggcgatcatccagtaacgtacgcggaagatggtcagcagcagcaggcccacggcgccccagaagatggcgcccatgcccacctgccacggcagccccatcgcctgcaccaccacaaaggcgaaaaaggcgttcaggcccatcgccggcgccagggcgaccggcaggttcgcgaacagacccatcaggatactgccgaaagcggcaatcagacaggtggtcacaaacacggcgctggtatccatgcccgctacgccaagaatttgtgggttaacaaaaacgatatacaccatcgtcaggaacgtggtgaaaccggcgatggcttcggtgcgcaccgtggtgccgtgctcgcgcagcttaaatacgcgctccagcagaccctggccagaagactggctggtttgttgttgactcattatcggtttccgaacgtaaggagggaaaattcgaggctatcctataccaaattacggcaccaggcgcggttgtatggtaatttttttcatttattttgcttatacggcaacgattgcgtcgcggcattgagcattacgaaaacgttaaacttgttaatatggaaaggctatgactcaaccagaagcagtattttttgactgtgacggcacgctggtcgacagcgaggtgatttgctcccgcgcctacgttcacatgtttcaggaattcggcattacgctggacctcgccgagatttttaagcgcttcaaaggtgtgaagctgtacgaaattatcgacaccatcaacgctgagtatggcgttaatctgcaaaaggccaccctggagccgatttaccgggccgaggtcgctcgcctgttcgatagcgagctggaggtgattcccggagcccaggcgctgctggatgcggtaagcgtcccgatgtgcgtggtttccaatggcccggtcagtaagatgcagcactcgctcggacgcaccggcctgctgcgccatttcactgaccgcttgtacagcggctacgatattcagcgctggaagcccgacccggcgctgatgtttcatgcggcagaggccatgcaggtaaaagctgaaaactgtattctggtggatgactccagcgccggcgctcagtcggggattgccgccggcatggaagtgttttatttctgcgccgatccgcacaaccagccgatcgatcatcccaaagtgacgacctttaccgatctggcagagctgccggcattgtggcaggcgcgcggctgggatatcacgcgttaagggcctggtgagcggcacgttggcatcgatgcccccccgctatgcgtctgcgtaagcggggaatagaactagcggctttttattgctgcaattccgccgccgccgctttatcggcaataatcaccagtgaagggtgcaatttgagcactgaagccggcacctgcacgctgaccggaccttccaccacttgctttaacgcgtgcgcttttgccgcaccgctgacaattagcaataaatttttcgccgccatcacgcttctcggccccatggtgacatagctgtctggtactgccgagatattcccgcccatctcgctgttagcgataagagcaatcatttccccatgaatcggcacttcgaccgtctgatcatgaaagcgggtggtattcggcaggttgccgcaaaaatggccgtcggcccccagccccagcaccatcagatccagaccgccagcctcttccagctggcgatcgtgctgagcggcgttgtccagcgtcagcttgtgaatgttctcttctttgatctgcgccggggtaaaaaacagctggcgcaaattagatatcgtgacgccttctcgcgactggccgcgaaaagggatctcatcgaagttgtaatagtgcacccgatcatagaatgctttgcctttcacggcggcggtcaaatgcttatacatccgctttggcgtgctccccgccgtcaccgccagattcacccgccgcggcgccgtgatatagcccagaacatgatggctggcgaccaggctcatctcttcataatcttcggtcacaatcattttcatcttgtcgtccttcacaagcacaaaacgggggctgaaggccccctaaaggttatttaaacagtttttgcacaaactcggcgtaggccgggcgccagacgtccatttcatggttcaggccgggatactggtggtaatcaaatttaatctgctgtttttccagctcgcttttcagaccagcaatgtctttaccggtcacagaatctttttccccgacgaccacggtaaagttacgcagctgcttattgatcgcgtcaggctgcttcagctgcgcttccacgccggcattcggcaccgtggtagtcgtaacgccgctaaaggtggcgagccagccaaagctctccagatgattcattccggaaaccagcgcctgataaccgccctgcgagaggcccgccagcgcccgaccgtcggcatctttacgcacgttaaatcgggcatcgatcagcggaataatatcctgcatgagctctttatccgccgcctgcgcattaagtggatagaaggttttgcgccgctcctgcggcgggaagttttccgcgaccgcttccgggatatcggtttcggtatccgggaccaccaccagcatcggcttaatcttgccctccgccagcaggttatccatgatttgcgggatccgcccctgatcgatggccgacaggccgctgtcgccaaagccatgatagaaatagagcaccggcagcggatcgccggttccgctatagcccggcggcgtccagacatagagacgacgttcggcgttcagagccttcgagtgataggtgagggtgcgcagatcgccatgcgcaacctcccgatcgtcaagaatactgcccggcaccagaatcaaactggtgttcacctggcgctgcggcttctgatagcggctgccggtatctaccgagcggaagccatccacatcgaaatagtattcatagagattgggcttcatcggctcgcttttccatgtccagactccgtccgctgctttggtcatgtcgtgcgagacaaaggagtccggcgtggcgccagtcactatcgagacccgccgggcatcaggggcaaacaagcggtaagtgatactcttatccgcgttaacctgggtgataaagtggctcaccggcaggcttgggtccggcatcgcgggtaatggcgccgcctggagggtaaacgccgcgcccgccagcgccagggcgaaataaattgcatgtcgtttcatcgttgttcctctttcgttgtgtccgttcagttatcgtctcaccaccagatttccgcctgcgcccccacggcaaactgatcgttcttcccgtcttcaaaaatgctggtggtattattcacggccttatccaggtcaatatccttcgctttaatataggtggcatagaaacgaatttccgggcgcgaggtcagcatactggtattgactttgaaggtatggaacagcgtggtcttgtagccggactcgttatatttcttgccggtaacatctttgttttgctgtttgaagtaccccagctcgacgccggtctggttatatttatcccagatataagccggtcgcagaaccgtacggatagattcaaaatcggagtgggctccggtttcgtagctatagacgtcgttaccaaaagagtagacgatggcattcgccataataacgtcatcgcgtaaataggtttccccctgcgaggttaagcgcacggcggtgccattggtatgatcgccataatagcggccattaaaggtggtataggggctggatccggcatagcgtgagaagctgctggcaatagagttattggccagtaagaaagagaattcgttaaagccgccgttagcaaatttctgcgttaacgaggtaccagccatccaggtatctttccacggataataaccttcattgccctctttatatttctcagaggaactttggttggcggcgacatagcgtccgctaaccatcaggctggctttatcccacagcggaatctctttgtaacgaacgtccagggtgttggtgttaatttgctgcttattgcttaaagaacggtcataatcatcgacatcttcgcgaatcaacgcgatatcgaatttcccggcgcccacctgccagttttccagccctacgccggccgccgcatcggttctctgcgttttccagtccagcatctggatttcaatttttggcgccccgtgtttgccgacccagaaatcggcttccggcgcaaacggcaggaaccctttggtgttaacatacatatccgagaattgaatgtagttttcgccgccggcattgtcaccaaaccagccagtggaatactgctggccgacgttcccgtcgagcatcacgatggcgtcgacgcgtttatcgccttcctgaaacacccgctgcttcagctgcagatcgaaccagccggaatattcattgcccaggcggccaagcgaaccgatcgcccatgattttggcgagccgtgcgaggcggtcccccagccggaacggaagtagccgttatagctaaagccaatttcatctttcacgaacttgctaaagtctttcagcgtcatcgcgctgtaggctggcgcgccatcggtgacaggttgttgatttttaaccagcaccgcatccggtttaaccgccgttttcggcccggcggtcgcccccccggtcttgcgcttctgaccttccgcaggaggagaccatgaggcccaaatctggtctctttttctttcctggtcctgatattttttgagctctttttgcgtgtctttgagcgctttttccagcagctcaagccgttgttccaccgtcaactggctcgctagcagattagttgaataacaaagtggcgccagcaagactatcgccgaagcgatcctgttttttctcatcataatattcccttatataatcattggcgtaaataaaacacgacaacaaccctattccgtgccggtgctaatagccgtatccataccgtttgacgtcgcggcggctgttatttttgcggttagacaaaaacaaaaaaacctgaagaagaccatctgccttggcagataatcctcttcaggttttgcccgcgcatcgcggtagcaaccctcattcagccattattggcccgcataaaacaaaaaacctgatatcgcccccaggagcaatatcaggttttgcctgctgtcgcagtcacaatccgtttaaaccatcctgagcgttaaaactcagtgagtggcagctgattgttacgcgataaaatgaataactcaaacgggcagattgttaattgtgacgataatctcagcaatctcgctgccgcggggtaaaacatatctaattctgataaatccatttaccagaattagacagaatgattattactctttcggatctttgccagcgagcagtttatccagctcatcgccgccaacgtgacggaaatcctgacctttgacgaagtagaaaatatattcgcagatattctggcagcggtcgccgatacgctcgatggagcgcgcacagaacagcgcggtcaggacgctggggatagtgcgcgagtcttccatcatgtaggtcatcagctgacgcacgatgccttcatactcctggtcgactttcttatcttcgcgatagatacgtaccgcttcgtcgagatccatacgcgcaaacgcatccagtacgtcatgcagcatctgcaccgtgtggcggcccagcgattcgaggctcaccagcagcggctggtgctgctgggaaaacttctccagcgcggtgcggcagattttatccgccacgtcgccaatgcgttccagctcagcgatagtcttgatgatcgccatcaccaggcgcaggtcgctggcggtcggctggcgcttggcgatgatgcgcacgcacgcttcatcgatagccacttccatcatgttgacctgcttgtcgccgtcgatgacgcgtttcgccagatcgctgtcctggttatgcatggcggtgatggcatcagagagctgctgttccaccagcccacccatggtcatcacctgggtgcggatatactccagttcagcgttgaactggccggaaatatgtttgttaagatttaggttgtccatggtgtctcctgattgcccaactggtgagagcctgaaagcacaagggcaaatcaaccgtagcggccagtaatataatcttcagtttgtttcttcgcgggcttagtgaacaggtcatccgtgttgctgaactcaatcagctcgccaagatacataaatgccgtatggtcggagcaacgcgcagcctgctgcatgttgtgagtcacgataacgacggtgtagtcctgtttcagctcggtgatcagctcttcgatacgcccggtggagatcgggtccagcgcggagcacggctcatcaagcagcagcacttccgggcggatcgcgataccgcgggcaatgcacagacgctgctgctgaccaccggagagagaatacccgctctggtgcagtttatctttggtttcgttccataatgcggctttggtcagcgcccactgcacgcgctcgtccatatcggcacgggacagcttttcaaacaggcgcacgccgaaggcgatattgtcgtatatggacatcgggaacggcgttggtttctggaacaccatgccaaccttagcgcgcagcagggcgatatcctgggtgttagtcagaatgttgtcgccatccagcaggatctcaccttccgcgcgctgctccggatacagttcaaacatcttgttgaacgtgcgcagcagggtggatttaccacagcctgacggaccgataaacgccgtcacctggtttttggtgatatccaggttgatgttcttcagggcatggaatttgccgtagtagaagttcaggttacgaactgaaatcttacccggagctgtattcaccatactcatctcaatctcttcctcattcagcgcagcagttgctgcgccgcaaaaaattaaccgtgtttcttcttggcgaagataacgcgcgccaggatgttcagcagcaagacgcacagggtgataatcaataccccggcccatgccagttgctgccactccgcaaacggactcatggcaaatttgaaaatggtcaccggcaggttggcaatcggctgcatcatgtcggtgctccagaactggttggacagcgcggtgaacagcagcggcgccgtttccccggcgatacgggcaatagccagcaggatcccggtcataatccctgagacggaggctttcagggtgatcgccgagatcatcttccacttcggcgtccccagcgcataggccgcttcacgcaggctatccggcaccagcttcagcatgttttcggtggtacgaataacgataggcacctgcagcagcgccagcgcgataacgcccgcccagcccgagaagtgctgcatctgcgccaccacaatggtgtagacgaacagacccaccacgatagacggcgcggaaagcagaatgtcgttgataaagcggatgatttccgccagcaccgacttgcggccatactccgccagataaattccggcgaggatacccagcggcgtaccaaatacggttgcccacaggatcagcaggccgctgccggcgagggcgttagccagtccaccgcccgccgtattcggcggcggcgtcatttcggtgaacagcgccagactcatgccgtcgaaaccgcgggttatcgtcgccatcaggatccagataagccagaacaaaccaaacgccatggtcgccatcgacagcgccagagcgatacggttcttcatgcggcgtttggcctgcatcttgcgacgggactccgccagttcggcggtagtttgcaattcaatggtcgccattagcgtgccccctcattcttcgcgaggcgcataatcataaacttcgacgcggccagaacgataaaggtgataacgaacaggatcaggcccagctccatcagcgccgccacgtgcaggccggtttccgcttcggcgaactcattagccagcgcggaggtaatactgttccccggcatatacaacgagatgctgtcgagctggtaggtgttgccgatgataaaggtgaccgccatggtttcacccagcgcgcggcccagaccgagcatcaccccgccgatcaccccattcttggtgaacggtaagacaatgcgccagatcacctcccaggtggtgcagccgatgccataggccgactctttcatcatcaccggggtctgttcgaaaacatcgcgcatgaccgcggcgatgtaagggatgatcatgatggccagaatgacgccagcggcgagaataccgataccaaacgccgggccggcaaacagcgcgccgacgaacgggatggtcgacagaacgttgccgaccggctcctggaagtaagtcgcaaacagcggggcgaaaataaacaggccccacatgccgtacacgatgctcgggattgccgccagcagctcaatcgcaatgcccagcggacgcttgagccaggcgggggacaattctgtcagaaacagcgcgatgccgaagctcaccggaacggcgatcagcagcgcgataaaagaggtgaccagggttccgtaaatcgggaccagcgcgccgaagatctcgttaggcgcatcccactctttggtccacaaaaaggcaaagccaaacttttgaatgctcggccaggaagagatgatcagggaaacgatgatgccgcccagcatcaatagcacaatcagcgcagccagttttaccagcgcactgaaaatcatgtcaccctttttccccggaggggtaaatgcaggcttggttgcagccatagattactctttacgtattaaaacttgttcgaataaatgcccggtggcgttggctcccgggcctacagtctgaaccgtagggcgggcagcgcctgaacgcccccgccatcttcgtcaaaaatctactgttagtacagcgctttaccgctgctgtctttgacgttggttttccatgccgcgcgaacctgctctaccacgctttccggcagcgtcgcgtaatccagcgcattcgcttctttcccgccgtttttatacgcccagtcgaagaacttcagcacttcagcggtctgttccggcttgttcgtcgccttatgcaccaggatgaaggtggttgaggtgatcggccatgcattctcgcctttctggttggtcaggtcctgagcgaaagacttgctccagtcaacgccttttgcggcgttagcgaagttgtcttcagtcgggctaaccggcttgccgtcggcagagaccagtttggtgtaggccaggttgttttgcttagcgtaagcgtattcgacgtaaccaatcgagccaggcagacgctgaacaaaggcggcgataccatcgttgcctttaccgcccagaccggttggccagtttacggtagagccggcgccgattttcgatttccactcttcattcactttggacaggtagctggtgaaaacgaaggaggtacctgaaccatcggcgcggcggaccacggcgatgttctgcgacggcagcttcaggcccgggttgagcttagcgatcgcttcgtcatcccattttttaattttacccaggtagatatcaccgagggttttgccatccagcaccagttcgccggatttcacgccaggcaggttaaccgccagtaccacgccgccaatcacggtggggaactggaacagaccttcctgggtcagtttgtcatcagccagcggagcatcagaagcaccgaaatcaacggtgttggcaataatctgcttaacgccaccagaggaaccaataccctggtagttcactttattgccggtttctttctgataggtatcagcccatttggcatacaccggcgcagggaaagttgcgcctgcgccagtcaggcttgctgctgcgaaggcagagaaagcgctcatcgataaggtcgcggcgacaactgttgcgacggtggtacgcataacgttcataatgtctcctgctgggattcgtaaatcattgtttcgaggctatggtgagcaaaataggtcaaagaggtgacagtaaaatgtacgaattatgacagttttatgacaggccgggagagtggattttacgccaaataatacgcttataactcagatggttatctttaatcatgaccgtgcaatgacaaaataattttctttttatgacggcgaaatcggaccgtaaaacgatcgtttgtcatctaccgccagccaaaatattgcgcacgtaatcgatggaaaacagcaggtgcaaataaaaagggccgccgtcggcagccctttgcaggataggatgctttactcaaccgttaccgatttcgccaggttacgcggctggtcaacgtcagtgcctttgatcagcgcgacgtgataagccaacagctgcagcggaaccgtatagaagataggggcgatggtctcttccacatgcggcatctcaatgatgtgcatgttatcgctaccgttgaagccggcttcaccgtgggcgaagacgtatagttcaccgccgcgggcacgaacctcttcgatgttggatttcagtttttccagcagttcgttgttcggcgccaccacgatcaccggcatttccgcatcaatcagcgccagtgggccgtgcttaagctcgcccgccgcataggcttccgcgtgaatgtaggagatctctttcagcttcagcgccccttccatagcgatcggatactgatcgccacggccaaggaacagcgcatggtgcttatcagagaagcgctctgccagctgctcaatacgcttgtcctgggagagcatttgctcgatacggttcggcagagcctgaaggccgtgcacgatatcatgctcgatagacgcatcctgacctttcagtcgcgccagtttcgccaccagcatcaacagcacggttagctgagtggtaaaggctttggtcgaggccacgccgatttccgttccggctttggtcatcagcgccagatcggactcgcgcaccagcgacgagcccggcacgttgcagatggccagcgagccgagatagcccagctctttcgacagacgcagcgccgccagggtatcggcagtttcaccggactgggagagggtgatcatcaggctattgcgacgcactgcggacttgcgatagcggaattcggaggcgatttccacatcgcacgggacgccggctaacgcttcgaaccagtagcgggaaaccatcccggagttataggaagtcccgcaggcaactatctgaatatgttcaacctgagccagcatttcattggcgttcggccccagttcgctgagatccacttcgccatggctgatgcgcccggtcagggtgttcttaatcgcgttcggctgctcgaaaatctctttctgcatatagtggcggtagatacctttatcgccagcgtcatactgcagattggattcgatctcctggcgcttcacttgcgcagcggacttatcaaaaatcaccaccgaacggcgagtcacttccgcgatatcgccttcttcgaggaagatgaagcggcgggtaaccggcagcaatgccagctggtcggaggcgataaagttttcacccatccccaggccaattaccagcgggctaccggagcgggccgccagcagagttcccgggtcacgggtatccatgatcaccgtaccgtaagcgccgcgcagctgcgggatagcgcgcaggacggcttcacgcaaggtaccgccttgttccagctcccagtgcaccagatgggcaataacttcggtatcggtctcggtgacgaagacatagccgcgagactgcagcagggcgcgcagcggctcatggttttcgatgatcccgttatggaccaccacaatgtgttcagaaacatgcggatgcgcattgctctcagacggttcgccgtgcgtcgcccaacgagtatgggcgatcccggtaccaccgtgtaacggttgctcttctaccgcctgagccagcatctgaactttacccaggcgacgcacgcgggtcatatgaccttcgctgtcgaccactgccagaccggcagagtcatagccacggtattccagacgacgtaaaccttcgagaaggatttcagcaatatcacgctgcgcgactgcgccaacaattccacacatagttaaatttcctgataatggcgatatgccatgcgttgtcgctgacctgtatttgcccgttttccgggcgccccgagccttgtagagagtggggttattgttatggtactgcctgcggacggggatctatgttgaccctctcatcctagttcgccgggaaaatttccccggcgataatccaaattatttcttcttcaccggacgctgccagccctgtttgtggacctgcggtacgcggctcaacaccagttcgttatcggcgatattgcgcgtgacggtggtgccggcggcgatcgtgacgccgttgcctaccgtgaccggggccaccagctgggtatccgagccgacaaagacatcatcgccaataatcgttttatgcttgttcgcaccatcgtagttgcaggtgatggtgcccgcgccgatattgacgttatcgccaatctccgcatcgcccagataggtcagatgacccgccttggagcctttcccgagacgcgcttttttcatttccacgaagttaccaacgtgggcgcctgccagcagttcggcgcccgggcgcagacgggcaaatggaccgatggtgcaggccgcctgcagctgggcatcttccaccacgctgtaggggctaatttcgcagtcatcgccgatggtgctgtttttgatcacgcagccggcgccgattttcactcgatcgcccagcaccacgttgccttccagaataacgttagtatcgatctctacatcgcgcccgtgctgcagcgtaccgcgcagatcgaaacgcgccggatcgcgcagcatcacgcccgccagcagcagcttttccgcctgctccgcctggtagacgcgctccaggcgcgcaagctgcaggcggttgttgacgccttcgacttcgctcaggcgctgcggatgcactgcgacgatctggtgtccttcctggtgcgccatggcgatgatatcggtgatgtagtattcaccctgagcgttgttattggtgagtttcgccagccagcgctttagatccgctccgccggcgatcaggatcccggtgttgatttcctggatctggcgctgggcctcgctggcatctttgtgctcaacgatgcccgtcacctggccattttcacgggtaatgcggccatagccggttgggtcatccagcttcaccgttaacagaccaatcccaccctgtggtttcgcggcgcgcaggcgctgtagcgtctcaacggagatcagcggcacgtcgccatagagcatcaggatgtcttcatcatcattgaagaatggcgccgcctgctgcatagcgtgcccggttccgagctgctcggcctgcagcacccagttcaggttgtcttcatgcagagtctgacgcagcagatcgccgccgtggccgtataccaggtgtaccgcacatgcgcctaaatcgttagcggcatcaatgacatgctgcaccattggcttcccggccagggtatgcagcaccttaggaagatcggaatacatgcgggtccctttgcctgcagcaaggataaccacgctcatcgcactatttgacatactcatcctgacggtagttagaacgaaaagtaaaagcctttcacgttgaaatttctacatatttttcatcataaaacgagacgtggagaaaacgtccaggctcactgttttaccccattttatgacgctatttttaaccactgcaaatcagtttaacgctgaaaaaggagggcggggtggagaatcattaactatctcactgcttttgctgttttttcgccacctgaataaagccgcagcggcagacgtttatcagcacccacagcgggaagaaccaggataaatattcgccagtcgctggcgggggagggcggtaaagtgattgatgctatccataaaaaacgaaaggccacctatcaggtgaccttcttttcccggtttcacatcgccagtgttgtcgttttgatgggcgatacgtcgtgtcagcgggcgagatagcgcggagcttagaagctcaggacgctaaatttagcgatgattttatggaacagtttcatgatgatttcctgacgcaggtgcagtttataacgctctttttgtgatatacatcacataaaaagagtttacgcctcatcatttaactaatcaataacaattaagggtgaatactgttttcacttcatccgctcgtcagcagcgggcaataaaaaaagccagcctggaacccagactggctttttacgttcaagccggtgttacatcgcttttttggtcaactcgataacgcgcagtttagcgatcgctttggccagttccgcagacgcctgagcgtaatccacatcgccgtgagagctcttaatgtgctcttccgctttgcgtttcgcttccagcgctcgcgcttcgtcgaggtcctgaccgcgaattgcggtatccgccaggacggtcacgctgccaggctgcacttcaagaatgccgccggacagatagataaactcttcatgaccgtgctgtttaacgatgcgaatcataccaggcttaatggcggtgagcagcggcgcgtggcccgggtaaatacccagttcaccttcgctacccgttacctggattttttcgaccagaccagagaacatttgttgctctgcgctgacgacgtccaggtggtaagtcattgccatatcaccctccgattaaggcgttaaagttttttggctttttccacggcttcgtcgatggaaccgaccatgtagaacgcctgctctggcaggtgatcgtattcgccttccatgatgcctttaaagccacggatggtgtctttcagcgccacgtatttgcccggagaaccggtaaagacttctgccacgaagaacggctgggacaggaagcgctggatcttacgcgcgcgagctaccaccagtttgtcttcttcagacagttcgtccataccgaggatggcgataatgtctttcagttcctgataacgctgcaggatggactgaacgccacgcgcggtgtcgtagtgttcctgaccaacaaccagcggatccagctgacggctggtggaatccagcgggtcaacggccgggtagatacccagggatgcgatctgacggctcagtactacggttgcatctaagtgagcaaaggtagtggctggggatgggtcagttaagtcatccgccggtacgtataccgcctgtacggaggtgatagaaccggttttggtggaggtgatacgttcctgcagaacgcccatctcttccgccagggtcggctgataacctaccgctgaaggcatacgacccagcagcgcggatacttcagtaccggccagggtgtaacgatagatgttatcgacgaacagcagtacgtcacgaccttcgtcacggaatttctcagccatggtcaggccggtcagcgcaacgcgcagacggtttcccggcggctcgttcatctggccgtacaccagggatactttatcgataacgttggagtcggtcatttcgtggtagaagtcgttaccctcacgagtacgctcacctacgcccgcaaacacagagtaaccggagtgctcgatcgcgatgttacggatcagctccatcatgtttacagttttacctacacccgcaccgccgaacagaccaactttaccgcccttcgcgaacggacacatcaggtcgataactttgatgccggtttccagcagttcctgagagctggacagctcttcataggacggtgccgcgcggtggatagcccaacgctcttcttcgccgatgtcgcctttcatgtcaaccggttgacccagtacgttcatgatacgacccagcgttgctttacctaccgggacttcgatcgggtgctcgaggtcttttacatccagaccgcggcgcagaccatcagaagaacccatggcgatggtacgtacgataccgccgcccagctgctgctgaacttccagcaccagaacttcattaccattctgtacctcaagggcttcgtacacgcgtggtacggcatcctgagggaactcgacgtcgaccacggcgccgattacctggacaatctttccagtagccatcttaaatcctctacgaaataacctggttaaaccgcggcggcccccgagacgatctcggtgagttcctgagtaatgctggcctgacgagctttgttgtataccaactgcagctctttaatcaggctgccgccattatcggtcgcggctttcatcgccaccatacgggcggcctgctcgctggccaggttttcaaccacgccctgataaacctgagattcgacgtagcggcgcaggagggtatccagcagcgctttcggatcgggctcatacaggtaatcccaggatttacgtttcagatcagcatcttctgatgccggtaacggcagcagctgagtgatcgtcggaacctgagacatggtgttaataaatttgttgctgacaacgtacagcttgtccagacggccttcatcataggcctgcaacatcacttttaccgggccgatcagttcggacagggatgggttatcccccataccggtcacctgtgcaaccacgttgccgcccacggagttaaagaaagaaacgcccttagagccgatcattgcgaggtcgcactgaacgcctttatcggaccatgctttcatttccgccagcagtttcttgaacaggttaatgttcaagccgccgcacagaccacggtcggtcgacaccaccaggtagcccacgcgcttaacgtcgcgttcttccaggtaagggtgcttatattccagattaccgttcgcaaggtgaccaatcactttgcgcatagtatctgcgtaaggacggctggccgccatgcgctcctgcgatttacgcattttggaagcggcgaccatctccatcgctttagtgatcttttgcgtgttctggacgcttgcgatcttactacgtatctcttttgcgccggccatgagcttctcctcaatgccttgcggcctgccctaagacagaccgccagacgttaccaggactgggttgctttgaaggaatcgaggatgcctttcagcttgccttcgatttcgtcgttatagccaccggactggttaatctcttgcatcagcggagcgtaatcacggtcgacgtaagccagcagagcggcttcgaagctaccgattttcgccagttctacatcagccaggtaaccacgttctgctgcgaacagaaccagagactgctgcgcgacggacatcggcgcatactgtttctgtttcagcagctcggtcactttctgaccgtggtccagctgtttgcgggttgcatcgtcaaggtcggatgcaaactgggagaacgccgccagttcacgatactgcgccagcgcggtacggataccaccggacagtttcttcatgatcttggtctgcgctgcaccaccaacacgggatacggagatacccgggttaaccgcaggacgaataccggcgttaaacaggttggtttccaggaagatctgaccatcggtaatagagattacgttggtcggaacgaatgcggaaacgtcacccgcctgcgtttcgataatcggcagcgcagtcagagaaccggttttccctttcacttcacctttggtgaaggcttcaacgtattcggcgttaacacgcgcagcacgctccagcagacgagagtggaggtagaatacgtcgcccgggaacgcttcacgtccaggcggacgacggagcagcagggagatctggcgataagcaacagcctgtttagacagatcatcgtaaacgatcagcgcatcttcaccgcggtcgcggaagtattcgcccattgcgcaaccagcgtatggcgccaggtattgcagtgcagcagattcagatgcagtcgctaccactacgatggtgttagccagcgcgccgtgctcttccagtttacgcaccacgttagagatggtggacgctttctgaccgatagcgacatagacgcacttgatgccggaatcacgctggttgatgatggcatcgatagccagcgcagttttaccggtctgacggtcgccgatgatcagttcacgctgaccacgaccgattgggatcatggcgtcaacggatttgtaaccggtctgtaccggctgatcgacggactgacgttcgattacgcccggcgcgatcgcttcaacggcggagaaaccgtcgttttccagcggacctttaccatcaattggcgcgcccagggtgttcaccacgcggcccagcaggccacggcctaccggaacttccaggatacggccagtacatttcaccttcatgccttcggcgaggtcagcgtacggacccattaccaccgcacctacggagtcgcgctccaggttcagtgcgatagcgtaacggttacccggcagggagatcatctcgccctgcatacattcggcaaggccgtggatgcggataacaccgtcacttacagaaacaatagtaccttcgttatgagcttcgctcacaacattgaactgagcaatgcgctgcttgatcagttcgctgatttcggtggaattcagttgcatgctccagtccccttaagactgcaagacgtctgcaaggcgctcaagacggccgcgtacgctgccatcaatgaccatatcacccgcacggatgataatacctgccataacagacttatcgattttgcaattcagcttaactttgcgtgacagacgtttttccatcgcgctgacgatcctggcaagctgttcatcactcagttggttggcagatattacttctacctctgcgatggcctcactggccgcgcgcaggtgaatgaattgctcaagaacgtccgggagcaccttcagacgattattttccgccatcaccttaatcaggttctggccattttcgtcgagttgctcgccgcagatagcgataaacgcttctgagagcgtttccggcgccaaagcaccggagagaagctctgccatttggtcgtttttggtcacttcggcggcaaacgccagcatatcctgccagcgttcaacactgttgtgttcgacggcaaagtcaaaagctgctttggcgtaggggcgagctaccgttacaaattcagacatcagcccctccctccttacagttcagcgacaagtttatccacgatgtcgctgttagcagcttcatccacggaacgttcgatgatcttctcggcgccagcaacagccaggatagcgacctgcttacgcagctcctcgcgtgcacgtttacgctcagcatcaatttcagcctgcgcttgtgcaacgattttggtgcgttcctgttctgcttcagctttagcttcgtccagaatctgagagcggcgcttgttcgcctgctcaatgattacctgggcttccgctttcgcttttttcagctggtcggtcgcgttggcctgtgcaaggtccaaatctttcttagcgcgttctgcagaagctaaaccgtcagaaatctctttctggcgtttttcgatggcagccattaaaggcggccatacgtatttcatgcagaaccatacgaagataacaaacgcgatggcctggccgaggattgttgcgttcatgttcacagcacaatacctctttaattaactctgtggcttaggtttctaacaacttactacgcgacggcgaacatcacgtacagacccagacctacagcgatcatcgggatagcatccaccagacccataacgataaagaactgagtacgcagcagagggatcagatccggctgacgcgctgcgccttccaggaatttacctccgaggatgccgataccgatcgcagcaccgattgccgccagacccatcatcacagcggcagccatgtacagcagatccatattcaggttttccatgacagtctccagtttgtttcagttaaaacgtagtagtgttggtaaaaaatcaatgctcttcagatgccatcgacagatagacaatcgtcagaaccatgaagatgaaggcttgcagcgtaataatcaggatgtggaaaatggcccaaggcacattcagaacccactgtgaccaccacggcaacagaccagcaatcagaatgaaaatcagctcaccggcatacatgttgccgaacagtcgcagaccgagagagaccggtttggacagcaggcttaccccttcaaggattaagttgacaggaatgaacgcccagtgattgaacggctgcatggtcagttctttaacgaacccaccaacgcctttcattttgatgctgtagaaaataatcaggatgaacacgccaagcgccatcgacagggtgatgttcacgtcggcagacggaaccacgcgcagtgctggcaggccgaaaatgtgttcgccgatataaggaagcaggtcgattggcagcaggtccatcaggttcatcaggaagacccagacgaacacggtcagcgccagcggcgcgataaccttgctcttgccatggtacatgtctttgacgctgccatggacgaagccgatgatcatttcgatgaaggtttggaatttccctggtacgccgctggtcgctttcttagcaacgctacggaacatggcaaggaacagcagaccgagaaccaccgagaagaacatggagtcaatgttgagcgtccagaaggtggctgtgtggttgtgcggatccaccagcgagaatgtacgcaggtccaactgaaggttgttcagatggtgtcctatgtaatcctgcggcgtcatattttctgaagccatgatgcctttaccctttgttgttaattacagctggcgccagaacttgtaccaccagcaccaaaacccacgtcacgatcagtggcaaaaataccacttttaaaacggccagcgccaccgccagaagggcgaaggtcagcaacaccttgaaggcttcaccgaaggcgaaggtccaggccacacggccttttgctggtgtatgcgcctgatgacgccaggcaaaaattataaacatcagatttggcaagaccactgccaaaccgccgcatacagcggaaatgccccagaaggggtctttgaggctgaacagcagtccacttgccattactgccagtaactgaataaacagaagcttgcgagcaacgtttcgactcaagagcgacactgacatcacgtttttactcctgctccctttgaggtatgtcgcgtgtcgtataaaacgtcctttaagacgaagagtcaagcatcaaaaagcggacaaattatacggtgacgccccgtgatttcaaacaataagtagcaaaatagtgaataaatgtttaattattttccaacggacaactttccgtgcatttcagcgttctgtgagcggtcatacaaaactgcaaataacgaggaaacacggcaattaaagcgtgcatcagatcacataataaacatttcaagcgccctttaatgaatcaaggacataaaacactatttttcatgcttttgatattcaagataaaaagtgaggacattatctaaaacaacctcacatacaataaaaaccttttattgacatttataataaaaatttaacatcactatgctgttcatcattgtcgatttttagcaccctgatattttcaaagttgactattttgtcagtgaatcacttacgctaagttaactgcaagaaaagccatagtaaaaacaaggttaaatgcagcccgttaatatcgggggacgtcctttatttttgtaacatgcgcgggccacattttttccacattttttgataaaaattaactcgattttggcttaatcaccaccaggtgccgctccccttccaaccgaggaacatgcagctcaatcacctcgacaatgtcatacccttccggcagactttccatttcttctttttgcgctaaccctttgagcgcatagaagtgaccattcgctgccggcagatgatggcaccagctcaccatatcattaagcgatgcgaaagcgcggcttatcacgccatcaaacggcggctcggccgggaaggcttccacgcggctctgcaccggggtgacgttatccagcttcagctcgtgctgcacctgacgcaggaagcgcacgcgcttgccaaggctgtccagcagggtgaaatgtgactccggacatacgatggccaacgggatccccggcaaccccgggcccgtaccaacatcgataaagcgcgagccctgcagataaggcgccacgatgatgctgtcgagaatatgacgcaccagcatctcattcggatcgcgaacggaggtcaggttataggctttgttccacttatcgagcagtccgacgtaagccaccagctgatttttctggtgatcggtgagcgaaatacccgcttcatccagcagacgagaaagtttgttgagcacggtaagtaccttcaaaaaataatgagcccggaggcgctaacgcttaccgggctatgaatgataaaggcgaacgctgattatgcaactgggaaatcagcgcggcaggcagccgcaatcaggcgctgcggcgcagcatcccctgctttttcagccaaaccagcaaaatagagatcgccgccggggtgatcccggagatacgtgacgcctgccctatcgacgacggtttatggtcgttcagtttggcaatcacctcgttagacagcccagtgacctggcggtagtcgagggtcgctggcagcaaggtattctcattgcgctgttgtttctcaatctcatcctgctggcgcgcgatatagccctcatacttcacctggatctctacctgttcagccgcctgacgatcttccagtcccggggtgaatggcgagagttgaaccagctgttcgtaggtcatttccggacgacgcagcagatcttcgccgctggcttcacgcgacaacggcgcggtcaggtgagcgttcacttcgttggcgctctctgcctgcggattcacccaggtggatttcagacgctggcgttcacgttcgatgctttccagcttctcgttgtagcgcgcccagcgttcgtcatctaccagacccagctcgcgcccctgttcggtcaaacgcaaatcggcgttgtcttcgcgcagcatcagacgatattcagcgcgggaagtaaacatgcggtacggttctttggtacccagggtgcagaggtcatctaccagcacgccgaggtaagcctgatcgcgacgcggcgcccagccctctttttccgcagagaagcgggcggcgttaagtccggccagcagcccctgagccgccgcctcttcataaccggtggtaccgttgatttggccggcgaagaacagaccctgaataaatttgctctcaagcgttggcttcagatcgcgcgggtcgaagaaatcgtactcaatagcgtagcctggacggacgatccgcgcattctccatcccctgcatcgagcggacgatttgcatttgcacatcaaagggcaggctggtggatataccgttcggataaatttcgtttgaggtcagtccttccggctcgaggaagatctgatgctggttgcgatcggcaaagcgcatgactttgtcttcgatcgacgggcaatagcgaggtccgatcccttcgatcactccggcgtacataggactgcgatcgaggttattgcggatcacatcgtgggttttctcgttagtgtgggtgatatagcacggtacctggcgcggatgctgatccgcggatcccatgaacgagaagaccggcatcgggttatcgccatgctgctgcgccagcacgctgaaatcgatggtgcgcgcgtcaatacgcggcggagtaccggttttcagacgacttacgcgcagaggcaattcacgcagacgacgagacagcgggatagacggcggatcgccggcgcggccgccgctgtagttgtccagaccaatatggattttgccgtcaaggaaggtcccgacagtcagcactaccgctttagcgcggaatttgaggcccatctgggtgacggcgcccacgacgcgatcgttttcgacaatcagatcttcaaccgcctgctggaagatcatcaggttcggctggttctccagcgcggtacgtactgcctgacgataaagcacgcggtcagcctgggcgcgggtggcgcgcactgccggtcctttgctggcgtttagtatcctaaactgaatacccgcctgatcgatcgctttggccatcaaaccgccgagcgcatccacttcttttaccaggtgtcctttcccaatgccgccaatcgccgggttgcaactcatttgccccagcgtgtcgatattgtgtgtcaaaagcagggtttgttgacccatacgcgctgcggccattgcggcctcagtgcctgcatgacccccgccaatgataatgacgtcaaaaggatcctgataaaacatggtggtctgcctcgcataaagcggtatgaaaatggattgaagcccgggccgtggattctactcaactttcgtctttcgagaaagactccgggatcctgagtattaaaaagaagatctttatatagagatctgttctattgtgatctcttattaggatcgactctctttgtggataagtcggatccgcgaagtaagatcaaaagcttaagaaggatcactatctgtgaatgatcggtgatcctggtccgtataagctgggatcagaatgaagggttatgcacagctcaaaaaccatactacggttattctttggataactaccggttgatccaagcttttaagcatggttatccacagaagatcggacgatctttacaattctcagagcaaatttttccaggatcccagccagatttccgctggatcctccggaatttcgtgttcaaggacgttgatcttcagcgtctcaccgatctgttttgccccgcaggccttcagcgccgcttctaatttatcgatcgcgccgcaaaaggtgtcgtattcgcggctgccgatccctatagcgccaaagcgcacggcggaaagatcggcctgcttctcctgcagcgcgtcatagaagggaaccaggttgtcgggaacgtcgccggcgccatgggtggaagagataattaaccagatcccttgcgcctgcagatcgtccaccagcggaccgtgctggatttcagtgctatagccggcttcttccagcttttccgccagatgctctgctacatattccgcactgcccagggtgctgccgctgataagtgtaatgtctgccatagatcgccgatcgcccgctcaactgttcagagtggcgtattgtacgctgtgagcgagctgggatctacctgtggaaaaatgtgggattaaaaaaagcgatcagggcttgatggtgcgcatgatcgggttctgcagcacgatcagagtttcagtggactgaatttcatcgattgtttggatcttgttgataagtacctgctgcagagcatcgatggatttacacatcaccttaataaagatgctgtagtggccggtggtgtagtaagcctcggtgacctcctccagactttccaggcgggcgagggcggagggatagtctttggcgctttttaaaataatgccgatgaagcaaccgacgtcgtagcccagctgcttggggctgacgtcaatgcgcgcgccggtaatgatacccgcctgcttcatcttttcgacgcgcacgtgaatggtgcccgggctgacgctgaactgtttggccagttcggcataggcggtacgggcgttggccatcagcgcatcaagaatgccgcggtccagattgtcgatctgataattttccatatctttttcttatgaagtttgagggttcttactattttagcgccatattttaatgaattaaaagttgatgcgcctttttattgattgattattgtatttccgccctgttttgttgcttaatcaatggcaacaggacgcaggagtcataaaaatgaaaaccgcatatatcgcaaaacaacgccagatcagtttcgttaaatcccacttttcccgtcagctggaagagaagcttggcctgattgaagtccaggcgccaatcttaagccgcgtgggcgatgggacgcaggataacttgtccggctgcgagaaagcggttcaggtaaaagtgaaaacactgcccgacgcccagttcgaagtggttcattcgctggcgaagtggaagcgtcaaaccctgggacaacacgacttcagcgcgggcgaagggctgtacacgcacatgaaagcccttcgccccgatgaagaccgtctgacgcctatccattccgtctatgttgaccagtgggactgggagcgcgtgatgggggatgaagagcgtcacgtcggcaccctgaaggcaaccgtcgaggcgatctacgccgggatcaaagccaccgagctggcggtcagccaggagtttggcctgacgccgttcctgccggaacagatccattttgttcacagccaggagctgctgagccgctatccggagcttgatgccaaaggtcgtgagcgggctattgccaaagagctgggcgccgtcttcttaattggtatcggcggcaaactagctgatggcaagcgccacgacgtgcgtgcgccggattatgatgactggagtactgaggtttctgaaggttttgccggcctgaacggcgatatcctggtgtggaacccggtgctggaggatgcgttcgagatctcctcgatggggatccgcgttgacgccgaggcgctaaagcgccagctggcgctgaccggcgatgaagatcgcctgaaactggagtggcaccaggcgctgctgcgcggcgagatgccgcagactatcggcggcggcattggccagtctcgtttgacgatgctgttgctgcagcttgaccatatcggtcaggtgcagtgcggcgtatggccggcgcaggttcgcgaaagcgtttccgcgctgctgtaacgattagcgccgccagcgtcgcagcaggcggctacgcagcccggtgtcaaagcgccagatatgatcgaagatgcgcatgatgccgggtttgccgtgaaccgacatcgccaccgcgtgaaaacggtgctgatgcttacgctgtaactcccccacctgagcaatcacctcatccggcaaccgttgggcaataaagtcggagatcaccacggcatccgcatccacccactgcgggttttgcaaacgttcaataatggcgcgaaaacagctggccagatcggtgccgccgcgaaaacgctggctcaggaaacggatcgcctgctccagtccgctctcgctggtcaactcgtaatgcactacttcgctggaaaacagcataatgaagcagcgacggttatcggccagcgcgatgcgcatcagggccagacaaaaggccttagcgcactgttcgttaaaaccgcccatcgatcctgacgtatcgacgcagacaatgaacggcccgcgcggttgctcatcaaaatcctgccgcgttaccgggcgttcggtaattttctcgcgccaggcatcgccgtgtagccggtaggtgagcagctgtttctccaccagcttgcgataaaattcaaactccagctccgtgatgccaagcgtcgccagctccggcggcagcaggcgtagaatgtcgtcgctctgctggaggccgtcgacctgttcaggcaccgttgccggctcgcgtaccaggctgcggaaggtttccatcggcgcatctttcttcggcacggatttcgcttcccttgaacgccccagctgttccgccagctgcagcagctccggttgctggttaagaaaatcgccatagcgcacgatcagctggtagtcgcctcgtttgagttcgccggcgctcatatcccacaggcgtccggcggcggtatcattttccgccagcaccggatcgagctgaccgctgagcgtcattcgttcctggacctcactgagcaactggtcgcgctcctcgtccagcagctgctggttaaggctggtggcttgcaccaccaggctcaggcgccagcgctgtaaaaacagcgtatgcagcgccggggtaaaggtggcattgtcatccaccagcttctgcgcctgggcggcaaaaggggactggagctggtgcagtttgccgagaatttgcgggagctggacgataaactgcgaggtagagagcagctgagcctgctgataggtttgcacttcggcgtccagatccggcgggatgttaacttcttttaagcgggcgcgaacggcttcccgccagcgcggaatatccgccgcgatgatgtttttcaggcggggaaatttttcaaagaacaccgccagttgaggagaggccaacagcgccagcagcatctcctcgatcattccctcttcgctgactgccagcatgacattcagcatatcgagcgtcatggctgcttcgcctgtttaatctgcgcgccgacgtcctgcaggctggcttcgattcttcccagccattcgaccgggataaacaggcacttttgctgctcgctgaagcggttgtgttgctggtgccactcatcatccagcgcttccagctgctggcgaatttccgccggcatattctcctgcgctgcgctgccgggcagcgcgaggcgtgagccctgcaggctcacatcgcggacgaccagatgctggctggtgtcgacatccatattgagtagttgagcaaagccgatcccgttgagcttaccgcggatctcgccgcccttttccagccagttggctaacgcctcgcgttcaaaagtaatgtggatcacttccatatcgtgaagtttgagcggctgctgcagcagcagcgtcagggtggtcccctggatctccgccggcagttcatagtgcggtttgcggctaaacatcccgccaaggcgggtgaccttcagcgccgttttgtcgctttgctgttgttggatctgaatgcgtcgctgcacaatcgcccccaaccgcgtcagcatcgcctgctgttgccaggcgtgacaggtcatgagcgtttccagctgctgcgacatcaggttcatactttcgacgttgtgccacagacaatctttcagcaggattaggtcaatcggcgcgatgctgtcgcggccgctgaagaaggcgctggcctgcagcaggcgaatagcctttttccagcggcgatccgagacgtagggggcatttggcagggcgtccagctgctggcggagctggaatatcagctcaaacaccgcgtccggcagtttaatattgccgatctgctgctgccattgggtaaattcctcgtcgctcacctgcagcgcgctgggcactggattgctgttttcatcctgctggctgaccagcatcgaacggaaattacctttatcctgcactttatcaagccatagacggatcagcattcggtcatacagcgcttccaggctgctgtcggcttccgggagttcgttcgacgcggccaccagcaggcgcattgggattttctcttcatgcgcgccattgcggaagtgacgttcgttaatcgccgtcagtagggtgttgaggatagccggacctgctttccatatttcatcgagaaacacgatttccgcttccggcaggtagccggcggttaaacgttcgtaacggccttcatctttcagcgcctgaatggacagtggcccaaaaacctcttccggggtggagaagcgggtcatcaggtattcaaaagcgcgcgcctgctggaaggcgaatttgaggcggcgggcaatcaggcttttggcgatccccggtggaccaagcaaaaaaacgctctcgccgctgagcgccgccagcaggcagaggcgtatcgcgtggctgcgttcaaagagtcctttttcgagtgccgcgctgagccgggaaattctttcagccagtaaatgtgtttgagccataattgagttgcgtgctttgtcatgtatcgttattgggacgagtatagatgttagagccggggcggtaatagcctgaagaatcgatttattttttttgagccaggttaatatggtgtctgttaggggtacgatttcacaaataatcgtgcatactgtgcgctttttgtgggccaagggactaggcacacatttgttttataaacgaaaagactagtctatgagcactgataataaacaatcgttgccggcgttaacgctggcggccatcggcgtggtgtacggcgatatcggtaccagtccactgtataccctgcgcgaatgcctgtcaggtcagtttggctttggcgtagagcgcgatgccgtttttggctttttgtcgctgattttctggctgttaatctttaccgtatcgattaaatacatcaccttcgtgatgcgggcggataacgccggggaaggcgggatcttaacgctgatgtcgctggccggacgtaatacttcggccagaatgacctccgtgctggtgatcctcggccttatcggcggcagtttcttctatggcgaagtggtgattaccccggcgatttcggtaatgtcggcgatagaggggttagaaattatcgccccgcagctggatacctggattgtccctatctccattatcgtgctcaccctgctgtttgtgatccagaagcacgggactggcatggtcggcaagctgtttgcgccgattatgctgatctggttcctgttgctggcggtgctgggcgcgcgaagcatttacgctaatccggaagttctgcaggcgctgaacccctactgggctgtgcactttttcctgcaatacaagaccgtttcctttattgcgcttggcgcggtggtgctgtcgattaccggggtggaagcgctgtacgccgatatgggccacttcggcaaactgccgatccgcgttgcctggttctccgtcgtgctgccctcgttggtgctgaactattttggccagggcgcgctgctgctgaagcacccggaagcgattaaaaacccgttcttcctgctggcgcctgagtgggcgctgatcccgatgctgatcatcgccacgctggcgacggttatcgcctcccaggcagtgatttccggggtcttctccctgacccgtcaggcagtgcgtctgggctatctgtcgccgatgcgcattatccatacctcggaaatggagtccgggcagatttacattccgttcattaactggctgctgtacgtttctgtggtcatcgttatcgtcagctttgagcattcgtctaacctggcggcggcgtatggtatcgccgtaacgggcaccatggtgctgacctccattctgtcggcgaccgtggcgcgcaaaaactggcactggaacaagctgtttgtcggtctgatgctggtggccttcctgtgcattgatattccgctgttctcggcgaacctcgataagattgtctccggcggctggctaccgttgtccctggggatggtgatgtttacggtgatgacgacctggaagagcgagcgtttccgcctgctgcgccggatgcacgagcatggcaactcgctggaagcgatgatctcttcgctggagaagtcaccgccagtgcgtgtgccgggtactgcggtgtatatgtcccgcgccctgaacgtgatcccgtttgccctgctgcataacctgaagcacaacaaggtgctgcatgagcgagtgatcctcctgaccctgcgtaccgaagatgcgccttacgtgcataacgttcgccgggtgcagattgagcagctgtcaccgtctttctggcgggtggtggccagctacggctggcgggaaacgcctaacgttgaagaggtgttccaccgctgtggcctggaaggactcagctgccggatgatggagacctcgttctttatgtcgcatgagtcgctgattatcggcaaacggccatggtatctgcgcctgcgcggcaagctttatctgctgctgcagcgtaacgccctgcgggcgccggatcagtttgagatcccgccaaaccgggttatcgagctcggtacccaggtcgaaatctgatgtcaaaaaagcccttccattgcgaagggctttttgtttctcactccggttgttatgtcctgtcgctgcctcgcgaaacgtttcgatggcgatcacatttctctcttctggtgatggttttctgctcacacattgataataattattttagcgaaacgtttcgctagtggagcaaaagagaaaaaatgaaaaaaggcaccgtacttaacgctgatatttccgcggtcatttcccgcctgggccacaccgatacgctggtggtctgcgatgccggattaccggttccccgcagcagcacgcgcattgatatggcgctgactcagggcgtaccttcatttatgcaggtgctggaagtggtgacgacggaaatgcaggttgaagcggctgtcatcgcggaagagattaaaacccataatccgcagctccacgcgacgttgctcactcacctcgagcagctgcagcagcaccagggaaataccattgaaattcgttacaccagccatgagcagttcaaaaaacaaaccgcagacagtcaggcggtaattcgcagcggggagtgttccccgtttgcgaatatcattctctgtgccggcgtcacgttctgaggtcgccgtcatggaagccttattgcaactgaaagggatcgacaaagcgttccctggcgtcaaggcgctctccggcgcggcgctgaatgtctatgccggccgggtgatggcgctggtaggggaaaatggcgccggcaaatccactatgatgaaggtgttgaccgggatctacacccgtgatgccggctctttgctgtggttaggcaaagagacgacctttaacggcccaaaatcctcccaggaagccgggatcggcattatccatcaggaactgaacctgatccctcagttgacgatcgccgagaacatcttccttggccgcgagttcgttaaccgttttggcaaaatcgactggaagcagatgtatgccgaagccgacaagctgttggcaaagctgaatctccgctttaccagccagaaactggtgggcgatctatcgattggcgatcagcaaatggtggagatcgccaaagtgctgagcttcgaatcgaaagtcatcattatggatgaaccgaccgatgcgctgaccgataccgaaaccgaatcgctgttccgcgtcatccgcgaactgaagtcgcaggggcgcggtatcgtctatatctcccaccgtatgaaagagatcttcgagatttgcgacgacgtgacggtctttcgtgacgggcagtttatcgccgagcgcgaggtctcgtcgctggatgaggaccgacttatcgagatgatggtcggccgtaagctggaagaccaatatccacacctcgataaggcgcccggcgcggtgcgcctgaaggtcgacaacctctgcggcccgggggtggataacgtgacctttaccctgcgccagggggagatcctcggcgttgccgggctgatgggcgccgggcggaccgaactgatgaaagtgctgtacggcgcgttgccgcgcagcagcggttccgtgacgctcgatggccgcgaagtggtgacccgttcgccgcaggatggtctggcgaacggcattgtctatatctccgaagaccgtaagcgcgatggtctggttctcgggatgtcggtaaaagaaaacatgtccctgacggcgctgcgctatttcagccgggcgggcggtagtcttaagcataaagatgaacagcaggcggtgagtgatttcatccgcctgtttaacgtgaaaacgccgtccatggagcaggcgatcggcctgctctccggcggcaaccagcaaaaggtcgccatcgcccgcgggctgatgacccggccgaaggtgctgatcctcgatgaaccgacccgcggcgtcgacgtcggggcgaagaaagagatctaccagctcatcaaccagttcaaagccgacggcctgagcatcattctggtctcctccgagatgccggaagtgttgggcatgagcgatcgcatcatagtgatgcacgaagggcatctcggcggtgaattcacacgcgagcaggccacccaggaagtattgatggctgccgctgtgggcaagcttaaccgtgtgaatcaggagtaagaaagatgacaacccaggctgtttctggtcgccgctatttcacaaaagcgtggctgatggagcaaaaatcgctgattgccctgctggtgctgatcgcggtggtatcgaccatgagccccaacttttttaccgtcaataacctgttcaatattctgcagcaaacctccgttaacgccattatggcggtagggatgacgctggtcatactgacctcggggatcgatctgtccgtcggctccctgctggcgctcaccggtgcggtggcagcgtcgatcgttggcattgaggttaatgcgctggtggcggtcgcggctgccctcgcattaggtgcggcgatcggcgcagtcaccggggtgattgtagcgagaggccgcgtgcaggccttcatcgccaccctggtgatgatgctgctgctgcgcggcgtaaccatggtgtacaccaacggcagcccgatcaataccggctttagcgataatgccgatctgttcggctggtttggcatcgggcgtccgctggggatcccgacgccggtatggatcatggcgattgtcttcctggcggcctggtacatgctgcaccatactcgcctgggccgttatatttatgccctgggcggtaatgaagcggcgacgcgtctgtccgggattagcgtcaataaagttaaaattatcgtttacgccttgtgcggaatgctggcttcgctggccgggatcatcgaagtggcgcgtctctcctccgcgcagccgacggcggggacgggctatgagctggacgccattgcggcggtggtgctcggcggcaccagcctcgctggtggcaaaggacgcatcgtcggcacgctgattggtgcgctgatccttggcttcctgaataatggtcttaatcttttaggcgtttcttcctattaccagatgatcgttaaagcggtggtgattttgctggcggtactggtagataacaaaaagcagtaactaagaactctacaggacatcttaactatgaatatgaaaaaactggcgaccctggtctctgctgttgcgctaagtgcgaccgttagcgcgaacgcgatggccaaagacaccatcgctctggttatctctaccctcaacaacccgttcttcgtgtcgctgaaagacggcgcgcaaaaagaagctgacaagctgggctacaacctggtggtgctggattcccagaacaacccggcgaaagagctggcgaacgtccaggatttaacggtgcgcggcaccaagctgctgctgatcaaccccaccgactctgatgccgtcggcaacgccgtgaagatggcgaaccaggcgaaaatcccggtcatcactctcgaccgtcaggcgacaaaaggcgatgttgtgagccatatcgcctctgacaacgtgcagggtgggaaaatggctggcgattacatcgcgaaaaaagtgggtgaaagtgcaaaagtcattgagctgcagggcattgccggaacttctgcggctcgcgagcgtggcgaaggctttaaacaggccgtggcggcgcacaaattcaacgtcctggccagccagccggccgatttcgaccgcaccaaaggccttaacgtgatgcagaacctgctgaccgcacatcctgacgtccaggcagtgttcgcgcaaaatgatgaaatggcgctgggcgccctgcgcgcgctgcagaccgcaggcaagtccgatgtgatggtggttggatttgacggcactccggatggcgaaaaagcagtaaacagtggcaaactggcggcgaccgtcgcacagttgccggagcagatcggcgcgaaaggcgttgagactgctgataaggtactgaagggcgaaaaagtggaagctaactacccggttgagctgaagctggtcgttaagcagtaatatgcgattcggactggcaacggtccgagggacaatataaaaaaagaaaagcagggcatgcgccaccggatcccggtggcgcgctttcccgggaacagaaatgatgaaagctgcaggcaaacttgtcgtccttggcagtatcaatgccgatcacattcttaaccttgacgctttcccgacgccgggcgaaaccgtcaccggccaccattatcaggtggcgttcggtggaaaaggggccaaccaggcggtggccgccgggcgcagcggagcggatatcgcgtttatcgcctgcaccggcgatgacgatatcggtgaacgcatccgtcgtcagctggcgagcgataaaatcgacgtggcccccgtgcgcgcggttgccggggaagcgaccggggtggcgttaattttcgttaacgccgaaggtgagaatgtcatcggtattcatgccggcgccaatgcggcgctttccgtctcccaggttgaggcggaaaaagagcgtatcgccagcgcacaggcgttgttgatgcagctggagtcgccgctggagagcgtcatagcggcggcgaaaatcgcccatcaccatcacaccaccgtggtgctgaaccccgcgccagcgcgtgaactaccggatgaactgctggcgctggtggatattattacccctaacgaaaccgaagcggaaaagctgaccggtattcgggttgagagtgacgaagatgcggcaaaagccgccaacgtgctgcatgccaaaggcattggtacggtgatgatcaccctcggcagccgcggcgtctggctcagtgccgaaggcgaaagccgccggatcctagggtttcgcgtacaggccattgatactatcgcggccggtgatacctttaacggcgcgctggtgaccgcgctgctggaagggaccgccctgccggaggcgattcgctttgcgcatgccgcagcggcgatcgccgtaacccgcaaaggtgctcagccgtccgtgccttggcgcacagagatcgatgaatttttagcgcaacaggggtaatgcttggctacgatgaaagatgtggcccgcatcgcgggcgtttccacatcgacggtgtcacacgtcatcaataaggaccgctttgtcagcgaggcgattaccgccaaagttgacgctgcgatcaaaagcctcaactacgccccctctgcgctggcgcgtagcctcaagctcaatcaaacccgtaccatcggcatgctgatcaccgccagtaccaatccgttttattcggagctggtgcggggcgtggagcgtagctgctttgagcggggttatagcctcgtgctctgcaataccgaaggtgatgagcagcgaatgaatcgtaatctggagacgctaatgcaaaaacgcgtcgatggattactcctgctgtgcacggagacccatcagccctccccggaaatcatgcagcgctatccgtcggtaccgacggttatgatggactgggccccctttgatggcgatagcgatctgattcaggataactcgctgctcggcggcgatatggcgacccagtatctgattgaccaggggcattcacgcattgcctgtattgccggcccgctggataaaaccccggcgcgcctgcgtcttgaaggctatcatgccgcgatggcgcgctgcggcctgccggttgccgaaggatatgtggtgaccagtgattttgagtttggcggcgggtttagcgcgatgcagcagctgctggcgttgccgcagcgtccgcaggcggtgtttgtcggtaacgatgcgatggcggttggcgcttatcaggcgttataccaggccgggctgctgattccgcaggatatggcgctggtgggctacgatgatattgagctggcacgttatatgacgccgccattgaccaccattcaccagccaaaggatgagctgggggaactggccatcgacgtactgatccatcgcatggccgatccgcagcaaaaacagcagcgcgttcagttaacgccggagctggtggttcgcggttccgcttagcgtttatgccgctcgctaatcaggttgcggccatccttcgctcttaacagcataaacatcagcgccgatataatggttatcacgcccatggttataaaggtgtagtgaaactgctgtaccgtgcttgcattatcaaaaccttcatagaagcgtagcaccgcagcgctgatggccaccccgagactaatggaaagctgctgggtgacggccagcaggctgttgccgctgctggcattatcatcggtcagatcggccagggtaatggtattcatggcggtaaactgcgtggacatcgccatccccagcacgaacagcggcagaagaagcatccacagcggcatctctggcgactgcagcgagaactgggcgatcataaggccaataaacacggtgatccccaccagggtcttacgatagccaaaccagcgcagcacctgggtaacggtggatttcgcaataatcgagccgatagcggtgggggcgatcatacagccggcgataatggccggatagccgaaaccaacctgcagcatcagcggcatcagaaacggtacgcagccggtacctaaccgcgtggcgaggttgccggcaatgccgaccgagaacgtatgggtcttaaataaagagagcgagataagcggcgtcggatggcgacgcgcgtgacgcacataggccacgagcagtaacagactgacggcaatcacggccagcgcctgccatgtcgccacgattttttccccaaacagttcaataccgctggaaaataacaccagacttaagccaaataacagaaaaccgcctatatcgaagcgtcggcgcggcgttgtgaaatttggcatgtatttacgggcgtacagaatgccaattacgccgatcggaatgtttatcaggaaaatccaatgccagctggcccaggtaacaaataccccgccgagtaccgggcccagaatcggccccaccaatcccggcatggtgacaaagttcaggaccggcaacagttcgctgcgggggtaggcacgcagcagggccagcctcgccaccggcatcatcatcgccccaccgatcccctgaattacgcgaaaaatgaccagttccgttaaggaactggagagggcgcaggcgagggaaccgagggtgaacaggctaacggcgatgataaagacccggcgcgtgccgaagcgatcggccagccagccgctgaccgggatcagcatcgccaccgtcagcgtatagctgataatggccgactgcatcgctaagggagaacgattaagactgtgggcgatagccgggagggcggtgttaagaatggtggcatccagcgcctgcataaagaaggccatcgccgcgatccacggcaggccagccatgctgcgccctttttttccgctcatgccaaatccttgttattgatttacgtggtgtggggcgttcaacaatgcctggcaggcgagcaacgcccccggcgcatcactgttaagaatggcatcgacaatcgcctggtggagatcgagcttcaccacttcattttgcgtaatcgacgtgaagtaggtgtggtagaccgaatgaaacagcgaggcgaaagagctgaggaaaggattaccgctcatttcatagatatgctcatgccaggccatatcgacttctatccagcgttcgcgctgaaaatggcgtttcagagcaatcatctcttccattaatgtattgagctgcgctttttgcccggcggtgccgttggcggcggcgagaaagcaggcctgtggctccaggctgctgcgcatgacgagaaagtggcttaccacctcttcgaagttatcttctgttagccaccaggagagcagttccttatcaaggaaattccagctgctgcgcggcatcacccgggtgccaatgcgagggcggggcagcagcatgccttttgcagtaagcgtcttcaccgcttcgcggacggcggtacggcttacgccgaactgctcccccaactccatttcgccgggaagaatgctttccggctgatattcgccagtcagtattttttgggcgagcttttcggccagtacccaggagatgttcttttgtgccgccagttgctgtgcgcttaaagacataaatgccgttcctttctttcctctactctaacagtatgccaccaggcgccccgtttcgtcggttaaaacggcaaaacggcggttttttgcgacattcctcgccgcattgttgaaaaaagagacggttgaaaactttttttgcatttccccttgtcacctcagaattactccctataatgcgcctccactgacacggaacaacggcaagcaagccgccgggtcagcggggttccggtgagaacctcgcagagaaaagcaaaaataaatgcttgactctgcagcgggaaagcgtaatatgcacaccccgcgccgcagcgaaaacgaagcggcactgctctttaacaatttatcagacaatctgtgtgggcactcaaagtgacatggattcttaacgtcctcggacgaaaaatgaataccaagtctcaagagtgaacacgtaattcattacgaagtttaattctttgagcatcaaacttaaattgaagagtttgatcatggctcagattgaacgctggcggcaggcctaacacatgcaagtcgagcggtagcacagagagcttgctctcgggtgacgagcggcggacgggtgagtaatgtctgggaaactgcctgatggagggggataactactggaaacggtagctaataccgcataacgtcgcaagaccaaagtgggggaccttcgggcctcatgccatcagatgtgcccagatgggattagctagtaggtggggtaacggctcacctaggcgacgatccctagctggtctgagaggatgaccagccacactggaactgagacacggtccagactcctacgggaggcagcagtggggaatattgcacaatgggcgcaagcctgatgcagccatgccgcgtgtgtgaagaaggccttcgggttgtaaagcactttcagcggggaggaaggcgttaaggttaataaccttggcgattgacgttacccgcagaagaagcaccggctaactccgtgccagcagccgcggtaatacggagggtgcaagcgttaatcggaattactgggcgtaaagcgcacgcaggcggtctgtcaagtcggatgtgaaatccccgggctcaacctgggaactgcattcgaaactggcaggctagagtcttgtagaggggggtagaattccaggtgtagcggtgaaatgcgtagagatctggaggaataccggtggcgaaggcggccccctggacaaagactgacgctcaggtgcgaaagcgtggggagcaaacaggattagataccctggtagtccacgccgtaaacgatgtcgatttggaggttgtgcccttgaggcgtggcttccggagctaacgcgttaaatcgaccgcctggggagtacggccgcaaggttaaaactcaaatgaattgacgggggcccgcacaagcggtggagcatgtggtttaattcgatgcaacgcgaagaaccttacctggtcttgacatccacagaactttccagagatggattggtgccttcgggaactgtgagacaggtgctgcatggctgtcgtcagctcgtgttgtgaaatgttgggttaagtcccgcaacgagcgcaacccttatcctttgttgccagcggttcggccgggaactcaaaggagactgccagtgataaactggaggaaggtggggatgacgtcaagtcatcatggcccttacgaccagggctacacacgtgctacaatggcatatacaaagagaagcgacctcgcgagagcaagcggacctcataaagtatgtcgtagtccggattggagtctgcaactcgactccatgaagtcggaatcgctagtaatcgtagatcagaatgctacggtgaatacgttcccgggccttgtacacaccgcccgtcacaccatgggagtgggttgcaaaagaagtaggtagcttaaccttcgggagggcgcttaccactttgtgattcatgactggggtgaagtcgtaacaaggtaaccgtaggggaacctgcggttggatcacctccttaccttaaagaacctgcctttgtagtgctcacacagattgtctgatgaaagtaaagaagcaaggcgtcttgcgattgagacttcagtgtccccttcgtctagaggcccaggacaccgccctttcacggcggtaacaggggttcgaatcccctaggggacgccacttgctggttcgtgagtgaaagacgcgtgccgaactatctcaaaactcatcttcgggtgatgtttgagatatttgctctttaaaaatctggatcaagctgaaaattgaaacgacacactgtttaagtgtgttcgagtctctcaaattttcgcaatcagaagtgaaacatcttcgggttgtgaggttaagcgactaagcgtacacggtggatgccctggcagtcagaggcgatgaaggacgtgctaatctgcgaaaagcgtcggtaaggtgatatgaaccgttataaccggcgatgtccgaatggggaaacccagtgcaattcgttgcactatcgttaactgaatacataggttaacgaggcgaaccgggggaactgaaacatctaagtaccccgaggaaaagaaatcaaccgagattcccccagtagcggcgagcgaacggggagcagcccagagtctgaatcagcttgtgtgttagtggaacggtctggaaagtccgacggtacagggtgatagtcccgtacaccaaaatgcacaggctgtgaactcgaagagtagggcgggacacgtggtatcctgtctgaatatggggggaccatcctccaaggctaaatactcctgactgaccgatagtgaaccagtaccgtgagggaaaggcgaaaagaaccccggcgaggggagtgaaaaagaacctgaaaccgtgtacgtacaagcagtgggagcaccttcgggtgtgactgcgtaccttttgtataatgggtcagcgacttatattctgtagcaaggttaaccgtataggggagccgcagggaaaccgagtcttaactgggcgttaagttgcagggtatagacccgaaacccggtgatctagccatgggcaggttgaaggttgggtaacactaactggaggaccgaaccgactaatgttgaaaaattagcggatgacttgtggctgggggtgaaaggccaatcaaaccgggagatagctggttctccccgaaagctatttaggtagcgcctcgtgaactcatcttcgggggtagagcactgtttcggctagggggtcatcccgacttaccaacccgatgcaaactacgaataccgaagaatgttatcacgggagacacacggcgggtgctaacgtccgtcgtgaagagggaaacaacccagaccgccagctaaggtcccaaagtcatggttaagtgggaaacgatgtgggaaggcacagacagccaggatgttggcttagaagcagccatcatttaaagaaagcgtaatagctcactggtcgagtcggcctgcgcggaagatgtaacggggctaaaccatgcaccgaagctgcggcagcgacactatgtgttgttgggtaggggagcgttctgtaagcctgcgaaggtgtgctgtgaggcatgctggaggtatcagaagtgcgaatgctgacataagtaacgataaagcgggtgaaaagcccgctcgccggaagaccaagggttcctgtccaacgttaatcggggcagggtgagtcgacccctaaggcgaggccgaaaggcgtagtcgatgggaaacaggttaatattcctgtacttggtgttactgcgaaggggggacggagaaggctatgttagccgggcgacggttgtcccggtttaagcatgtaggctgattgtccaggcaaatccggataatcaaggctgaggtgtgatgacgaggcactacggtgctgaagtaacaaatgccctgcttccaggaaaagcctctaagcatcaggtaacatcaaatcgtaccccaaaccgacacaggtggtcaggtagagaataccaaggcgcttgagagaactcgggtgaaggaactaggcaaaatggtgccgtaacttcgggagaaggcacgctggtgtgtaggtgaagtccctgcggatggagctgagaccagtcgaagataccagctggctgcaactgtttattaaaaacacagcactgtgcaaacacgaaagtggacgtatacggtgtgacgcctgcccggtgccggaaggttaattgatggggttatccgtaaggagaagctcttgatcgaagccccggtaaacggcggccgtaactataacggtcctaaggtagcgaaattccttgtcgggtaagttccgacctgcacgaatggcgtaatgatggccaggctgtctccacccgagactcagtgaaattgaactcgctgtgaagatgcagtgtacccgcggcaagacggaaagaccccgtgaacctttactatagcttgacactgaacattgagccttgatgtgtaggataggtgggaggctttgaagcgtggacgccagtctgcgtggagccaaccttgaaataccaccctttaatgtttgatgttctaacgttggcccctgaccggggttgcggacagtgtctggtgggtagtttgactggggcggtctcctcccaaagcgtaacggaggagcacgaaggttagctaatcctggtcggacatcaggaggttagtgcaatggcataagctagcttgactgcgagcgtgacggcgcgagcaggtgcgaaagcaggtcatagtgatccggtggttctgaatggaagggccatcgctcaacggataaaaggtactccggggataacaggctgataccgcccaagagttcatatcgacggcggtgtttggcacctcgatgtcggctcatcacatcctggggctgaagtaggtcccaagggtatggctgttcgccatttaaagtggtacgcgagctgggtttagaacgtcgtgagacagttcggtccctatctgccgtgggcgctggagaattgaggggggctgctcctagtacgagaggaccggagtggacgcatcactggtgttcgggttgtcatgccaatggcactgcccggtagctaaatgcggaagagataagtgctgaaagcatctaagcacgaaacttgccccgagatgagttctccctgagactttaagtctcctgaaggaacgttaaagacgatgacgttgataggccgggtgtgtaagcgcagcgatgcgttgagctaaccggtactaatgaaccgtgaggcttaaccttacaacgccgaagatgttttggcggatttgagaattttcagcttagattcagagttgagtacgcaatataaagaattgcatactgagcacaaagaatttgcctggcggcactagcgcggtggtcccacctgaccccatgccgaactcagaagtgaaacgccgtagcgccgatggtagtgtggggtctccccatgtgagagtagggaactgccaggcatcaaacaagtgaagagcccatcctgtcggatgggctttttgcgtttctgtcgtccggccagcgtgccggcatgtccccccggtggcgctgcgcttgccggggctacggatccgacacggggctacgtccctgtggccggacaaggtgcgcagcaccgcctccgggaaaatccctcctatatcaccgtcgataaatgactattgcctctctaaccaactcacaataaatgtcgcgatctgtggtacatcatttaaatccagcagcggaagtgaggtcgcgatcgatacatcgctggccacggcgatggtatgctcatcaattaccagctcttctacacgatggccgctgttttgccgaaaaagcaggatcttcggcacgggttcatgtttaaacccctccactaaaaccaggtccagtttgctggcatccattcgactgaccagccacgtgagatctaattccggcttctctggcgtctcggtcatcaatgcccaccgctgttcgctggcgacaatagtttgcgcagcgcccgccttacgcagttcatagctatctttgcccggcttatccacgtccatatcatgatgggtgtgctttatcagtcccgggcgtaatcctagagcgcaaagctcagggataagacgctttaataatgttgtttttccggtaccgctccatgcggcgatcgccagtaatgggatcatgatggctcctgcatctgctgcaaatcttcgagcgtatttacattaatgaaagcagttttcacatcgctgaaattcaccgggcgcccacccatttgtcgcataaaaaccatcaccctgcgctctccatgtgccagataagcctccagttcaggaatgatttgacgatgaactaatgcaacggcaggatgatcccgttcgccgtcatgggcccaaacgaccggtgcgtcccctctctgctggataaagcgctccaccaaaaaggacggaatgaacggcgtgtcgcaggggcaaaaaacaaaccatgggctcgcgacctgctgcatcacagcaagcattccggccagcggtccctgataaccctcctgtatgtctcgaaagaccggaaatccgctggcacgccactgttcaagatgacgattggcgctaatgactaactcatctacctgcggggctaatgcttccgcgacgtgtcgccagagagggcgaccatttagcgcctgtaatcctttatcaatgccgcccatccgcgtggccctgccgcccgccagcacgacgccggttatcgcctcgctttgcatatgaatatcgcctctttcattgtgggattgaccctgttaacttgtccctatcaagagtaaggagcatgaccatgaaatgtaaacgtctgaatgaagtaattgaactcctccagccagcctggcaaaaagagcctgaactgaacctgatgcaatttttgcagaagctggcgaaagaggccggctatgatggcgaactgagcgatctttccgacgatattctgatctatcacctgaagatgcgcgactcttccaaagatgctgtcatcccgggtattcagaaggattatgaagaggactttaaaaccgcgctgctgcgcgcccgcggggtaataaaagagtaaaaggttgtaagcgctaccgcgtaaagtgcaatgagatgatatcctgaactattcgtacgattatcggatgtcaggatgcacgataaggcttttacttttcagacgcttcgcccggataccattatcgatgggttattcgatctgggtatgcgggtggactccggtctcaccccgctaaacagctatgagaaccgcgtttatcagttccaggacgaagagcgccatcgctatgtggtaaagttctatcgtcctgagcgctggtccgcagaacagatccttgaagaacaccagtttgcgcttcagcttgtagaagatgaagtgcccgttgctgcgccgctcttatttaatgacagcacgcttcatcagcatcagggattctactttgccgttttcccaagccttggcggtcgtcagttcgaagcggataaccttgatcagatggaatgggttggccgctatctggggcgcctgcaccagacgggctgcaaacagcgctttactgcccgcccggaaattggcgtgcaggagtacctgctggaaccgcgtcaggtgtttgagcaggcgacgctgatcccctctggcctgaaggccgatttcctgaaggcgaccgataaactcattgctgccgtcatggagcaatggcacggccgcgggaacacgttgcgcctgcacggtgactgccatgccggtaatatcctctggcgcgacggaccactgtttgtcgacttagacgatgcgcgcaccggcccggcgattcaggatctgtggatgctgctcaacggcgataaggctgaacagcgtatgcagctggagactattgtcgaggcctatgaggaattcagcccctttaacagcgatgaaatcgcgctgattgaacctttacgcgctatgcgactggtttattatctggcgtggttgctcagacgctgggacgatcccgctttcccggtcaatttcccctggttaaccggggaggattactggcgggggcagacgtcgacttttcttgagcaggtgaaggttctacaggaacccccgcttcagttaacgccaatgtattaatgtgatatatccaggagagagtaaatcatgaaaaaagtttggctggcgctggctggtatgattctggcttttagtgcatccgctgcccagatcaccgacggcaagcagtacatcacccttgataagccgattgctggcgagccgcaggtgctcgagttcttttcgttctactgcccgcactgctaccagtttgaagaagtgctgcatgtctctgacaatgtgcgccagaaactgccggaaggcactaaaatgaccaaataccacgttgagttcctgggtccgctgggcaaggatctgacgcaggcatgggcggtggccatcgcgctgggcgttgaagacaaaattactgcgccgatgttcgaagccgtgcagaaaaaccagactgtgcagagtgtggctgacattcgtaaagtgtttgtcgacgctggcgtgaaaggggaagactacgatgccgcatggaatagcttcgtggtgaaatctctggtcgctcagcaagagaaagcggcagccgatctgcagctgcagggcgtaccggctatgtatgttaatggtaaataccagctgaatccgcaggggatggacaccagcaatatggatgtcttcgtcgctcagtatgcggataccgtgaagcaactggtagagaagaaataaaaaaaacgccggtcactgaccggcgttactttatctgttttgcaatagctaccgttctttgtccctcatgatgtcagtcaactgacggtctttctcttcccataggccattcagccagcgctggaagccgcgcttaaagttcttatcgttaacgtaatcgccgtgcagctcttcgccaatagggaccagattgatacggaccacgatgcgcgtcaggcggccgcttaacatatcgtaaaatggtcttgtatgattatccgggtagcacagcgtgacgttcagcagtttatcgaactgcgaaccgagtacgttgagcgccatggcgataccagcggctttcggcggtaacaggttgtggtaaggagagcgcgtttcgcgctttttttcttcggtaaaacgcgagccttccacaaaattgacgatagtcgtcggatgcgcgcgaaatttttcacacgaacggcgggtggtttcgacatctttaccgcggcgctccgggtgacgaataagatagctgcgcgagtagcggcgcataaaaggcatatccagcgcccagcaggcgaggccaatgaagggtacccacgccagctgttgtttaaggaagtacttattcatcggaatatgcttgcggaacaacacgcacagcaccacgatgtctgcccagctgtggtggttgctgatcagcagataccagttctttttgttcaggccttccagaccctggacgtcccattttagccagggattgagatgcaacagcagcgccagcccttcgcaccagcagtacatcataaaattgcaaaaaacggatatagagcgccataccgctggaatggggaccagcagtttaatcagcccggcgacgatgatcggtacagagcagataatggtgactaagatggttaaggcgatactcagcggaagtgttatcgcagcgagtaatctcgacatagttagtttattcagaaagttaggctgacaaagagcgcctttaagctgcgcaagaggctgattttaccagaaaacgcggcaaatgacgggtcttaccagaacagaaaaaaacaaggatcttctatccacatggaagattaggtcatcaaattaatgccaggatcgttgatttgtttttaagtggttgataaatagtaaataatactatttattcatttattttcaggggcggataagctgacgttgtaaaactatacacaaagttatccacaagctaagttgtcgcgcgatcgcgacgatcgttgaatcttttccgcgaattgcgggaaaaattcaggatttcatgcccgtctgtggcatcctttatccataatctgataaacaggcacggaaattatggttcagatcccagaaaaccctctcatcctcgttgatggctcctcctatctttatcgggcgtatcatgcgtttccgccgctgactaacagcgcaggggagcccaccggggctatgtacggcgtactgaatatgctgcgcagtttgatactgcagtatcaaccgactcatgccgtcgtggtctttgatgcgaaagggaaaaccttccgtgatgaattgttcgagcattacaaatctcaccgcccgccgatgccggacgatctgcgcgcgcagattgagccgttgcataagatggtgaaagcgatggggctgccgctgatggcagtcccgggcgtcgaagctgacgatgtgattggcaccctggcgcgggaagcggaaagggcaggtcgcccagtcctgatcagcaccggcgataaagacatggcccagctggtgacgccgggcatcaccctgatcaataccatgaccaacactatcctcggaccggatgaggtggttactaagtacggcgtcccgccggagctgattattgatttcctggcgctgatgggcgactcctcggataacattcccggcgtgccgggcgtgggcgaaaagaccgcccaggcgctgctgcaaggcctcggcggccttgatacgctgtatgcggaaccggagaagatcgctgaactgagcttccgcggcgcgaaaacgatggcggcgaagctcgagcagaacaaggacgtggcttatctctcttatcagctggcgaccatcaaaaccgacgtcgagctggagctcacctgcgaagagctggaggtgcagccgccggcggcagacgatctgctggcgctgttcagacagtatgaatttaagcgctggaccaccgacgttgaggccggaaaatggctgcaggctaaggggggcaaaccggctgcgaaacctgcagcgcctgcagcagcggcagaagcggaagaagaggttgaagccgctactgcactttcagcagagcattatgtcactatccttgatgaggctacgctgctcacctggatcgataagctgaagcaggcgccgctctttgcctttgatacggaaaccgacagcctggataacatctccgccaacatggttggtctttcattcgctgttgagccaggcgtggccgcctatgtcccggtagcgcatgattatcttgatgcgccggatcagatcccgcgcgagcgcgtgctggcgctgcttaaaccgctgctggaggatgagaaggtgctcaaggtcgggcaaaatctcaaatacgatcgcggcattttggctaattacgacattgagctgcgcgggattgcgttcgataccatgctcgagtcttacattctcgacagcgtggcgggccgccacgatatggacagtctttccgaccgctggctgaaacataaaaccattaccttcgaagagatcgctggcaagggtaagaatcagctcacctttaaccagattgcgctggaagaggctggtcgctacgcggcggaagatgccgacgttacgctccagctgcatctgaagatgtggccgaagctacagcagcatgaaggcccgctgaatatcttccagcatattgaaatgccgctggtgccggtgctgtctcgcgttgagcgcaacggcgttaaaatcgaccccgccgtgctgcatgcgcactcgcaggaaattgcccagcgcctggttgagctggagcagcgagcacatgagatcgccggggaagcgtttaatctctcctccaccaaacagctgcaaacgatcctgtttgaaaaacagggtatcaagccgctgaagaagacgccgggcggtgcgccgtccacctctgaagaggtgctggaagagctggcgctcgattatccgttgccgaaagtgattctggagtatcgtgggctggcgaagctgaagtcgacctataccgataagctgccgctgatgattaaccccaaaacgggccgcgtgcatacctcctatcatcaggcggtcaccgccaccggccgtttgtcgtctaccgatccaaacctgcaaaacattccggtgcgtaacgaagaagggcgccgtattcgccaggcgtttatcgcgccggaagattacgtcattgtctcggcggactactcgcaaatcgagctgcgcattatggcgcacctgtcgcgggataaaggcctgctgaccgccttcgcggaagggaaggatattcaccgggcgacggcggctgaagtatttggcttaccgctggacagcgtcagcagcgaacagcggcgcagtgcgaaagccatcaacttcggtctgatctacggcatgagcgcctttggcctggcccgccagctgaacatcccgcgtaaagaagcgcagaagtacatggatctttatttcgaacgttatccgggcgtcctggagtatatggagcgcacccgcgcacaggcgaaggagcaagggtatgttgaaacgctggatggccgtcgactctatttgccggatatcaagtccagcaatggcgctcgtcgtgccggcgcggagcgtgcggcgattaacgccccgatgcaggggacggctgcggatattatcaagcgggcgatgattgccgttgatgaatggctgcggagcgagaaacctcgcgtgcggatgatcatgcaggttcacgatgaactggtctttgaagtgcataaggatgagctcgatgccgtatcgaaaaagatccacgaactgatggagaacagcactacgctggcggtaccgttgctggtggaagtgggcagcggcgaaaactgggatcaagcgcactaagtatacaaagcgcaacgcgattttctgtaagtaagcaacataacttatagagttttgtgaggatcatttgaatttgctatgtaaatagtgaaaaaaaactacaaaaaatgctttatccgtgagcgaaagaagagtaaagttattcgcgtagggtacagaggtaagatgttctatctttcagaccttttacttcacgtaatcggatttggctgaatattttagccgccccggtcatttatgaccggggcgttttttattgcgcgaaagaaaagtttaaggctgtgaaaacaacgtagtatgaacgtccggatagggcgctacgcgccgttatccggaaaaagcgggggttactcggcgtcttcgacggcttcttgcggcgggatttcgttaaaccagctatccagcttctgtcgcagcttatcgacgccagattttttcagcgaagagaagggttcaacctggacatcgccattgaaggccagtaccgcttcacgcaccatattcacttgcgctttacgcgcgccgctggcgagcttatcggctttggtgagcagtaccagcacctgaatatcgctctctaccgcccattcgatcatctgctgatcgagatctttaagcggatgacgtatgtccatcagcaccacgagacccttcaggcatagacgtttttccaggtattcccccagcgcgcgctgccacttgatcttcatctcttcgggtacttgcgcataaccatagccgggcaggtcgacaaggcgcttgccctcagcgacttcgaacaggttaatcagctgcgtacgccccggggttttggaggtacgcgccaggttcttctgattagtcagcgtattcagcgcgctggattttcccgcgttggagcggccggcgaacgccacttcaataccggtatcggcaggaagatggcggatatctggcgcgctagtgacaaagtgcgtcagttgataattccagttggtcaagacggtcgtctccgttaaaacaggctatggcagcgattatacctgaacagcagaaaaaggctgtttttaccgcacgccgttcctgtaagtaaaaaccatatggtttgtgagacattgactattctttgtataggacatacctgaggaaaataagacaaaacatatttaaagtgttgaaaattaattaattatagaaatagagaattctgaaaatagatttttaactgccagactggttgtcgatttttgtcaacaaggtaaagtaatacacaacggcggggatgctgaaaggattaggactcaggacgaggagtcaggaagcgccaggaggcgaagaccacaggatagtcaggatgacgcgcgtcttggagacgttttacagggaaaaggaagaaacagggaccgttggacgctaagggaaagacagggtgagtcgttagcgaacagggaaagaagagcccgttaagggtggtcagtgaggaaaaaggcgacagagtaatctgtcgccttttttctttgcttgctttctgctagattccgcctcaattctatactgaatactactgtctgaagattacacatcatgaaaaaaccgacatccgccacccgtggcaaatccggccgcaagtcgcgtgaagagttaaatcaggaagctcgcgatcgcaaacggcagaagaaacatcgtggccacgcggcaggcagtcgcgcgaacggcggcgatgcggcttcagcgggtaaaaaacagcgtcaggcgcaagatccgcgcgtgggtagcaaaaaaccgatcccgctgggcgtgagcgaaagcagcgctccagcccccaagcagcataaaccaaagagcgagaaacctatgctttcaccgcaggctgagctggagttgctggagaatgatgagcgcctggacgcgctgctggaacgtctggaagagggcggcacccttaatgctgaagagcagagctgggtggacgccaaactggatcgcattgatgagctgatgcagcagctcggcctctcttacgatgatgaagatgaagaagaggaagagcgtcaggaagatatgatgcgtctgctgaagggtggaaactaacatttgcatcccatcggattcccggtactccttataacccttctggttatatgttatctgctgtggttattcgttaaactacgacggttgtcgcggcgtcagaaatggctgcgcaaccggctcatgacccgcggtgcggtggggccgggacggcgtacccgtcggcggcaccatcggaaggagtgagcatgtctgagcagataatcgactgggatctggccctgatccagaaatataactattccgggccgcgctatacctcgtatcccaccgcgctggagttttcaccgcaatttggcgcggcggaattcgatgccgctgtggcccgttacccacagcgtcccctgtcgctgtacgtgcatatcccgttttgccataagctgtgttatttctgcggctgcaataagatagtcacccgccagcagcataaggccgatcaatatctcgatgtccttgaacaggagatcatccaccgcgcgccgctgtttgccactcgccaggtgaagcaactgcactgggggggcggcacgccaacttatctcaataaggcgcaaatcagtcgcctgatggatctgttgcgcagccatttccatttcagcgcggaagccgagatctccatagaggtcgatccgcgtgagatcgaactggatgtcctcgatcatttacgcgctgagggtttcaaccgcctgagtatgggcgtacaggacttcaataaagaggttcagcgtctggttaaccgtgagcaggacgaagcgttcatctttgatttgctcaaccatgcgcgggagattggttttacctcgaccaatatcgacctcatttatggcctgccgaagcaaacgccggagagcttcgcctttaccctgcaaaaggtcgccgagctcaatcctgaccgcctgagcgtgtttaactatgcgcatctgcccacgctctttgccgctcagcggaagattaaagatgccgatctgccctccgctgagcagaagctggagatcctgcaggaaaccatcggctcgctgacgacggcaggctatcagtttatcggcatggaccatttcgcccgtcccgatgatgaattagcggtcgcgcaacgtcacggcgtactgcatcgtaatttccagggctacaccactcagggcgataccgatctgctggggatgggcgtttcggcgatcagcatgattggcgacagctacgcccagaaccaaaaagagctcaagcagtactaccagcaggtagcagagcaagggaacgccctgtggcgcgggatcgcgttaactcgcgatgattgtctgcgtcgcgacgtgattaaagcgttgatctgtaacttccagctggatatcgcggcggtcgaggcgcagtgggatgtggattttgcgtcttatttcgccgaggatctgaagctgctggcgccgctggcgcatgacgggctggtggctgtggatgataaggtcattcaggtgacggcgaaaggccgcctgctgatccgcaacatctgtatgtgctttgatgcctacctacggcaaaaggcccggatgcagcagttctcacgggttatttaatattttccccctctcccgcaggagagggggaacaattagctgaacagcccgaccagcgcagcgcacagcacggcagcgactgccgtttgtggcgtgtgactcgcagcggcgccgctcgatatcatactcaccagtgattcaaacatgatgctctcccctaatgccgggcacgatcatactcaactcatcggaacagtaaagtacaaaatagcagcactttgcgccgatcggctatttttcatcatgctgttgaaccctactccatacccaactcttttagcttacgcgtcagggtattacgtccccatcccagcaggcgcgcagcctcctgcttgtgcccctgagtatggcgcagggcggtcgttagcagcgtgcgctccatttcgggttgcgcttctgagagcaggttttgatgaccggatcgcaacgcccgatcggcccactgacccagcagcgtagcccagctgtcaggctgcatctgcgttgggctatcaggaatcgtggtctcaaacagttcgctcggcagatcctgcgtcagcacctcctggccggcggccatgacggtgagccagcgacaggtgttttccagctgacggacgttgcctggccacgccaggcgggtcagcgctgtctccgtttccggatgcagctgtttggcttcaacgccgagctcgcgggcggctatctgcagaaaatggcgggccaggcgtggaagatcttcccggcgctcgcgcagcggcggtaaatgcacccggatgacgttcaggcggtggaacaaatcttcacgaaatttcccctcctgcacgcgctgttccaggttctggtgggtagcggcgatgatccgcacatcgaccttgaccggcgcgtaaccgcccacgcgataaaactgaccatccgccagcacgcgcagcagacgagtctggacatcaagcggcatatcgccaatttcatccaggaacagcgtaccgccgtcagcctgttcaaagcgaccctgacggacggtattggcgccggtaaaggctcctttttcatggccgaacagctcggactcaatcaggtccttggggatcgccgccatattcagcgcgataaacggcgcttttgagcgtggactatggcgatgcagggcatgtgcgacaagctctttaccggtaccggattcgccattgatcagcacgctgatggatgagcgcgacaggcggccaataatgcgaaagacatcctgcatagctggcgcttcgccgatgatgtcggcagttgggctacttatcggcgcatttcgcggctgctgctgctcttgatagtggcttatcgcccggtcgacgagggcgacggcttcatcgatatcaaaaggtttgggcaaataatcaaacgcgccctgctgataagcgctgaccgcggcgtccagatcggaatgcgcggtcattatgatgaccggaagcattggatggcgctgcttaatctgtttgagcagcgccaaaccatccattccgggcatacggatatctgacagcagtacatccggggttttggtggtgagggcatctagcacctcattgccgctttcgaacgttgtgcagctcaagccggctccggtgagcgcgcgttcaagcacccagcggatggagctatcgtcatcaacgatccaggctatccctcgttgcataaacacctctacttccgaataggcaggtataccgaaaattcggtatgacccggccagctggtgaattcaattttgccggagtgctgatcgataaggctacgggcgatagataagcccaggccggtaccgccttcgcggccgctgaccatcggatagaacagcgtatcctggagatggggcggaatacccgggccattatcttcaacgtcgatgcgggcggcgaggcgataacgcaccccgtgcagcgtcagctggaaagcggtgcgggtgcgaagaataatttcgcccccttccggccccagcgcctgcagcgcattacggacgatgttcagcaacacctgttcaatttgatccgggtcgtggggtagctctggtaggctggggtcgtaatcgcggatcaacttcacgttgtccggcaactccatggaaaccagtttaactacccgttcggcgactttgtggatgctttcggtaacgtgcatgcccggatgctgtggtccgagcaggcggtcgaccagatttcttaaccggtcggcctgctcaatgatcactttggtatattccgttagcgccgggtcgggcagcgctttgctgagcagctgggccgcgccgcgcaggccgcctaacgggttttttatctcatgcgccaggccgcggacgaggtcgcgagcggcgacctgctgcgcatgctgcagctgctcctggctcaggcggcgctgattatccatcggcgccatttccagcagaataaagccttccggcagccgctgggcggtcaacgacaggatgtgcgaacggccatcgataaccagcgtcacttcgttatcggtaaacccctggcccgcctgcaggctctcctgcatcagcccgatattcaacgaaaaatagctcaacagctcaggtaatggggtgccaaacagcttgcgcgagctctgcgccagcagctgctgcgccgcagggttggcaaagtgcaccgccaggtcatcatcgaccagtaaaatactgttgataagggagttaaggatctgcccagcatcgggcagtgtgcctgttgccattcgacagtctcctgaaaatgaatgcaccaatttagtgcagtatagctttttatcggtaaaaagctcgcgagatcagcgtgttggtggagaaaaaagcccatcctgagatgggctgaaagtttccacggcaacaaaatatcccgggcatctcgcgccacaacacgacataccctggatttacagcaaaattagacgctgtagtacagttcgaactcaaccggatgcggagtcatgcgtacgcggtcgttctcttccatacgcagggcgatgtaggcatcgatagcgtcattggtgaacacgccgccagcggtcaggaactcgcggtcagcatccagggcctgcagggcttcttccagagaaccggcaacctgcgggatctctttcgcttcttccggcggcaggtcatacaggtttttatccattgcttcgcccggatggattttgttcttgataccatcaaggccagccatcagcagcgccgcaaagcacaggtacgggttggcagccgggtccgggaagcgcacttcgatacgacgcgctttcggagaggtcaccaccggaatacggatagaggcagagcggttacgggcagagtaagccagcataaccggcgcttcgtaacccgggaccagacgcttgtaggagttggtggtcgggttcgccagggcgttgatggctttagcgtgtttgattacgccgccgatgtagaacagcgcctgctcagacagaccggcgtatttgtcgccggagaacaggttggtaccgtttttcgccagagacatatggcagtgcatgccggagccgttgtcgccgaacatcggtttcggcataaaggtcgcggttttaccaaagcggtgagcgacgttgtgaacaacgtatttgtaaatctgaatttcatccgcttttttggtcatggtattgaagcgggttgccacttcgttctgacctgcggttgctacttcatggtgatgggcttcaacaaccagacccatctcttccatgatcatacacatggtggaacggatgtcctgagaagagtctactggcggaaccgggaagtaaccccctttcacgcccggacggtgacctttgttaccgccttcgtatttggtggaggagttccacgcaccttcaatgtcatcgatcgcgacatgggagccggagatagaggcgccaaaacggatgtcgtcgaacaggaagaattctggttctggcccgaacaggacggtatcagcgatgccggtggcgcgcaggtactcttcagcgcgtttcgcgatggagcgcgggtcacggtcatagccctgcagggtgcctggctcgaggatatcgcagcggatgatcagggtcggttcttcgtagaacgggtcaatgaccgcggtggacgcgtccggcatcaggaccatgtcagattcgttgatacctttccagccaccaatcgaggagccatcaaacattttgccttcttcgaagaattcggcatttacctgatgagacggaatcgtgacgtgctgttctttacctttggtatcggtgaagcgcagatcgacaaacttcacttcgtgctcgttcagcatcgtcaaaacgtgttcagcggacatacttaaactctcccggattggtcattgtcgtcgtggtaacgaaaacttcatactgcttaaaagtggcgttgttgccttaaaaaatataaagcgaaatctgtgccaacttttaaatgccccataaaacgctgtatcatgcgcaccatagtgcaaaaggactgcaccatgatggagataatgcaccaaaatagtgcttcagtgtgaacattgagcaccattttggtgcaatttttgttacggtgcccttttatcgctccgtgaaagcggtcacaaagaaactctgcaatacttgtttgcggaggatgtttgtgatcctgttcagtccttcgcttaatacgtgtacaataacgcgctatttctaatgcctgaggcaaagttgtgatcgaaaatctgcgtaatatcgccatcatcgcgcacgttgaccatggtaaaactaccctggttgacaagctgctacagcaatccggtacgttcgacgcacgtactgaagcacaagaacgtgtgatggactccaacgatttggagaaagagcgtgggattaccatcctcgcgaaaaacaccgcaatcaaatggaatgattaccgtatcaacatcgttgataccccagggcacgccgacttcggaggtgaagttgagcgtgttatgtccatggttgactctgtgctgctggtggtagatgcctttgatggcccgatgccgcaaacgcgcttcgtgaccaaaaaagcttttgcccacggtctgaagccgatcgtggtcatcaacaaagttgaccgcccgggcgcgcgtccggactgggttgtcgatcaggtgttcgacctgttcgttaacctcgatgcgaccgacgaacagctggacttcccgatcgtttacgcgtccgcgctgaacggtatcgcgggtctggatcacgaagacatggctgacgacatgaccccgctgtaccaggcgattgtcgatcgcgtgccggcgccggacgttgatcttgacggtccgctgcagatgcagatctcccagctggactacaacaactacgttggtgttatcggcatcggccgcatcaagcgcggtaaagtgaagccgaaccagcaggtcactatcatcgatagcgaaggcaaaacccgtaacggtaaagtcggtaaagtgctgactcacctgggtctggagcgaattgagagcgacgtagctgaagctggcgacattatcgcgatcaccggtctgggcgagctgaacatctccgacaccatctgcgacccgcagaatgtcgaagcgctgccggccctgtccgttgatgagccgaccgtttccatgttcttcaacgtcaacacctctccgttctgcggtaaagaaggtaagttcgttacctctcgccagatcctggaccgtctgaataaagagctggtgcacaacgtggcgctgcgcgttgaagaaaccgaagacgctgatgcgttccgcgtttccggccgtggtgaactgcacctgtccgttctgattgaaaacatgcgtcgtgaaggtttcgagatggcggtttcccgtccgaaagttatcttccgtgaaatcgacggccgtaaacaagagccgttcgagaacgtgacgctggacgtcgaagagcagcatcagggttctgtcatgcaggcgctgggcgagcgtaaaggcgacctgaaaaacatgaatccggacggtaaaggccgcgtacgtctcgactacgtgatcccaagccgcggtctgatcggcttccgttcagagttcatgaccatgacctccggtaccggtctgctttactccaccttcagccactacgacgacgttcgtccgggcgaagtgggccagcgtaacaacggcgtactgatctccaacggtcagggtaaagcggtagcgttcgcgctgttcggtctgcaggatcgcggtaagctattcctcggccacggcgctgaagtttacgaaggccagatcatcggtattcacagccgttccaacgacctgacggtaaactgcctgaccggtaagaaactgaccaacatgcgtgcgtctggtactgacgaagccacggttctggttccgccggttaagatgaccctggagcaggctctggagttcatcgatgacgacgaactggtagaagttactccgacctctatccgtatccgtaaacgtcacctgaccgagaacgaccgtaaacgcgcgatgcgcggtgcaaaagaagagtaattttttcttcttgttgttcgctaaaccccgcctctccggcggggtttctttttttcattcctgcatcacacgccaatagtcaaatccagcctttcccgctaaagttaattttccacggcgcggaaggagacaaaaatgctctatatctttgatttaggtaatgtgattgtcgacattgacttcaaccgggtattgggagcctggagcgatttaacccgcatcccgctggcgacgctgaagcagcatttcaccatgggtgaggctttccatcagcatgagcgcggcgagctcagcgatgaagactttgccgccgccatgtgccatgaaatgaatatgcccctcagctatgaacagtttgctcacggctggcaggcggtgtttgtcgcgctgcgcccggaggtgattaccatcatgcataaacttcgtgcccaggggcatcgggtggtggtgctctccaataccaatcgtctgcacaccacgttctggcccgatgaatacccggaagtgcgcgcggccgccgatcgcatttatctgtcgcaggagatgggattgcgtaagcctgaagcgcaaatttatctgcgagtactggaagaagaggggttttccgccgcggatacggtcttttttgatgataacgtcgataatatagcaggggccaaccggttggggatcaccagtatcctggtgactggtaaggagaccatccctgactatttcgcgaaacagctatgctaaaaaccgttcatcaaaaattactccaccatacccggccgctgctggcgtggctaaagctgctgtggcggcgcattgatgaagatcatatgaccaccctggcggggaacctcgcctatgtgtcattactgtccctggtgccgctgattgccgtcgtgttcgcgctgtttgcggcctttcctatgttctccgaagtcagcgtgcagatccgtcattttatcttcgccaattttattccggcgaccggggatgtaatccagggatatatcgagcagttcgtggccaactccagccgcatgaccgccgtaggcgcctttggcctgatcgtcacctcgctgctgctgatgtactcgatcgacagcgcgctaaacaccatctggcgcagcacgcgcagccgccccaaagtttattcctttgccgtttactggatgatcctgaccctcggcccgctgctggcgggcgccagcctggcgatcagttcctatttgctgtcgctgcgctgggcaagcgacctggacggcgtaattgataatctgctccgcctatttccgctgatcctctcctgggcagcgttctggctgctctatagtattgtaccgactacccaggtacgtaaccgcgacgcggtgatcggggcgctggtggcggcgctgctgtttgaggcaggtaaaaaggcgtttgccctctatatcaccacctttccgtcctatcagctaatttatggggtgatttcggtggtgccgattttgttcgtctgggtgtactggacctggtgtatcgtcttgcttggcgctgaaattactgtcactctcggtgaataccgcaaacttgaaacagaagaaacagaacaaccatgattgcattaattcaacgcgtatcccgtgcaagcgttaccgtggcggacgaggtgacgggcgaaattggcccagggcttctggtgctgctgggcgtcgagaaagacgatgatgaacaaaaggcgaatcgcctttgtgaacgcgtgctgggctaccgcatcttcagcgatgcggaagggaaaatgaacctgaatgtccagcaggcgggcggcagcgtgctggtggtttcgcaatttacgctggcggccgataccgagcgggggatgcgaccgagcttctcgaaaggcgctgcccctgaccgcgctgaggcgctgtatgagtatttcgtcgcccgctgtcgccagcaggaaatgcacacccagaccggaagattcgctgcggatatgcaggtttctttggtcaatgatggtcccgtgaccttttggttgcaggtatgacccagcttccgggcaggctgcgggtaacaaaagagagtacgactatgtatcaccttcgtgtaccgcaaacagcagaagagttagagagctactaccagttccgctgggagatgctgcgtaagccgctgcatcagcctaagggatcggaacgtgacgcctgggatgcgatggcgcatcatcagatggtagtggatgaagagggcaacctggttgccgtcggccggctatatatcaatgcggagaatgaagcctccatccgctttatggctgtgcatccctcggtgcaggataaagggctgggtacgctgatggcgatgaccctggagtccgtcgcgcgtcaggaaggggttaagcgggttacctgcagcgcgcgcgaagatgcggtggaatttttcgccaagctcggatttgtcaatcagggggagatcaccaccccgaccaccacgccgatccgtcattttctgatgatcaaaccggtcgcgtcgctggacgatattttgcaccgcggcgactggtgcgcacagctccagcaggcgtggtatcagcatattccgctgagtgaaaaaatgggcgtacgtattcagcagtacaccgggcagaaatttattaccaccatgccggaggcggggaaccagaatccgcaccatacgctgttcgccggcagcctgttttcgctcgctaccttaaccggatgggggcttatctggctgatgctgcgcgagcggcacctgggaggcaccattattctggcggatgcgcatatccgctacagccagcctattagcggccgccccagcgccatcgccgacctcggttctctgagcggcgatctcgaccgactggcgcgcgggcgtaaagcccgcgtgcaaatgcaggtggagctttttggcgacgataaacagggcgccgttttcgaggggatctacatcgtgttgccggcgaagccctttggctcgtacgaagagggcggcaacgaggaagagtaagcgcctggggcagttatcgtcctggcgatgccacacgccaggcgatatcccgcatggcatcacgcgcggcgttgctgacgcctcccagctgaaagaagccgtggatcacccccagatagcgctgacaggaactctccaccccttgctccgtcagccttcggtacagcacttcgccctcatcacgtaaaggatcgaactccgccgtcagaatgtgtaccggtggcagcccgttaaaatcttcgcgccagagcggacaggcatccggatggtttgccggcgtcgaggcgaggtacatttcgtagccgctcagtagcgtgtcccgggtaatcacatagtcatcgccattgctgaggtagctcgccatgctggcggtggggtcaagcatcggataaatcaggatcagttgcgcgggttgccacgccgctttcgctttcaggcgcagggccgtgaccagagcgaggtgcccgccggcgctgtcgccggccagggtgatgcgcgaaacatccacgccaagctgttttgcgtgctggtgaataatcgtggcacctcgttctgcatcatcgtgcgccgccggaaaagggtactccggggccagacgatactgcacggcgatcacccggcacccactgaaccaggcaagctggcgcaattgattgtcatgggtggcaaagccgccgctgacaaaacagccgccgtggtagtagataagcgtgggtagcaggccgtcggcagtgggcggtgaaacgacgcggaagtgcataccctccagggtgatatcctccacccgcactcgcgtttccgtctccccggcgagtaccgcactggcgatatagccggccctccgatcatcaatatgctgatcgcgtgatgacggacgacctgccgcaataaatgcctcaaccagcgaagcaatccctttttccagcgccatatgaagttccttatactgttttaatatccagtgttatagcctggattatggcgaaaagacaggcctgttgaggtcgcctgtgcattatggaaagcggctcgcaaaaaagagtttacctgacaaaatcctgtttgtttccgatttcaaaagctgtagcttgctcataacttcatcactggtgatatacttgaggtatatatgagcatgatggctgaaagggatatgggcagaattcttctcgatttatcagacgatgtcattcaacgtctcgatgacctcaaagtgcagcgtaacattccgcgagcggaactgttacgtgaagcggttgaacaatatctggagaaacaagatcgagctaaagataccatctccagtgcgctgggtctgtggcaagactgcgaagaagacggcatggaatatcaacgtcagctacgcaaggagtggtaatgacctccggatctgcgctttttgataccaatattcttattgatttatttagcgggcgtcgcgaagccaaacaggcgctggaggcctggccaccgcagaatgcgatcagtctgattacctggatggaggtgatggttggcgctaaaaaatatcaccaggagcagcgcacgcgaatggcgctgagcacctttaatatcattaacatctcacaggatattgcagagcgaagcgttgcgctgcggcaggagtataagcttaagctgccggatgccatcattctggcgacggcgcaactccatcgtctggaactaattacgcggaatacgaaggattttgccggtattcctggcgtagtcacgccgtacgaaatccaccctgaataattcgagtggcaggaggacgacaagtgagcgacagactcgtctgaaacgaatatctccagccaaaggttggcctctgataacggtcagtgacgcgtgtgaataatccctgcgcacgttcgtgtcacaagaaggaaaacgggcgacaagagccgcccgaaatcatactgcagaacttactccccttcgccggggaacatgaacgggttaattgagcttctggcgaagccctcctgttccatgcgggcgtcgagcaccagggaggccaaatcgtcggcgacggcttcgactttcggatccttctcctgatacataatcttcaggtaggttccgcagtcgccgcagctttcggctttcaccgccgcctgctcgttgtccagcgaccagtagtgcaggtcgcggctctgctcgcagttgctgcacttgacgcgtactacgtgccactcagtttcgcacaggttgcagtgcagatagcgcagcccctgagtggtgccgatttgcacgatgctggagacaggcatcgagccgcacaccgggcagaactggcgctgttcgccgtattcggcgcgcgcttttcctgggatcagactggccatctgcgcccagtagagcgacagcgcagcccagatgaacggcgctttgtcgctactgacggaggcgaaatcggaaacaaacagcgcgctggccatctgctccagctcctgctcagaggctttttccagattctcaatgaccgccagcgccgggccgctcatttccggcttcagctcggcaatcagcgagtgcaacagcttgtgccagtgcttgtcgcgcggcaggacgtggatatccagcggcggcttgccctgttcgctggccgctttaatgcgggcggtgagatccatctgcagcggatggtcgtacagcactacttcctgggcatgggcaatcagcgcggcaaagcgcaggtaatcgcctagcgggttattagcggccagctcgcgcaagcgttcagcgcggcggttatacagatttttcagcctggggaacagtaacggcggaattgcttccgccgtgcgtttctcgctcgaacccagctcgtcttgcgggattatgcgaatactcattcagatgacttttcctgtttctggcggacctctcggtaccagcgcgggtgatgtttcttcgcccacgttttggtaacccagccttccaccatcgcggtaatggtgcctttcacccagagggcggcgtagatatgcaccatgataaccacaattaacgccactgcggcaaatgaatgcagcatcagcgcaaatcggatcaccgggattgagaaagccggcgcaaaatacggacgccagatgatcacaccgctcaccagcagcagtaccaggaagataatcgccgcccagaatacgcatttctggccgaagttatagcgcccggtatcgcccacctcctcgttgacgacgatcttacgaatattcttcgcccaaaagatatcatcccgattgattaggttgtgatgccagtaacggaaaaacatgatgataaacgacgcgaacatcaccaccccgacgaacgggtggagaattcgcgccagctgcggcgtgccgaggatatgcatcagccagttaaaggacgggaagaaaaagcctaacccgctcaccgccgccaggacgaagcagaaggcggtgacccagtggttgatgcgttccggcgccgtgtagcgcacgatggtgtcacgtcttttcatttgcgcacctcgtctttctcttcatgcagattgtcctcttcctcttccgcgcggttcggaccgacgccgacgtagtggaagatactggctgcgaaggtcgcggcgaagccgacggccgccagcggtttccagatgcctttccagaacttgacggtctggctgatctccgggttttccggcaggccgtggtacagattcggcttgtcggcatggtgcagcacgtacatgacgtgggtgccaccgacgccggccggatcgtacaggcccgcattgtcataaccgcgggttttcagctcagccacgcgttcgccggccagcgttttcatatcctctttggagccaaagtggattgcgccggtcggacaggttttcacgcaggcaggctcctggccgacggtcacgcggtctacgcacagggtacatttgtagacgcggttgtcttccgggttcagacgcggtacatcgaacggacagccggcgatacagtagccgcagccgatgcactgctcggactggaagtcgacaataccgttggcgtactgaatgatcgcgccttctgacgggcaggccttcaggcagcccgggtccgcgcagtgcatgcagccatccttgcggatgagccattccagcttgtcgttttgttccacctccgagaagcgcatgaccgtccatgacttggcggtcaggtccgccgggttgtcatacaccccgacattgtgaccgacttcatcacgaatatcgttccattcggagcaggccacctgacaggctttgcagccgatacaggtggtgacgtcgataagcttcgccacctcctgctggtggtcccgcgcctgaggcgcgggggtgaaaccgttagtcgcggaacgacgaataatatcttgcgattggtaagccataagtcgtctccgttacaccttttccacgttcacaaggaaagctttgaactccggcgtctgcgtattcgcatcaccgacgaacggcgtcagggtattggcaataaagccttttttcgccacgccctcatagccccagtgaataggaatgccgatggtatcgatatccttaccgtcaactttcagcgtgcgaatacgtttggtcaccaccgccttggctttgatatagccgcggttggaggaaactttcacggtatcgccgtggccgatgccgagcttattcgccagtttttcgccgatctccacgaactgttccggctgggcgatggcgttaagtagcgcatgcttggtccagtagtggaagtgctcggtcagacggtaagtggtgccgacgtacgggaacttctcggccttacccatctgctcgagatcgcctttgaagacgcgagcggccgggttagagaccacgttcgggtgcagcgggttggtcccgagcggcgtttcaaacggctcgtagtgttccgggaacggtccttccgccatcttgtcgatagcgaacagacggcccatcccttccggctgcatgataaacggaccgacgtcgctgccaggcgcggcggcgctgtagtccggaatatccacgccgccccatttggcgccgtcccatttcagcaactgacgcttcggatcccacggtttaccctgcgggtccgcggaggcgcggttatacaggatgcggcggttgagcggccaggcccaggcccagcccagggtattgccgagaccggatggatcggcgttatcgcggcgcgccatctggttaccttccggcgtccagctcccggcgaagatccagcagccgctggaggtggtgccatcatctcgcagctgcgcaaaggagctcagctgttggcctttcttgacgatcaccgcgccggttgccgggtcggtgatatccgccagcgctttaccgttgctttccatcgccacttcttccgatgccggctcgtgtggcgtggagtagttccacgtcatgttgagcaccggctccggcgccgggccaccctcttcggcatacatcttacgcaggcgagtgaagataccggcgagaatttcaccatcggtgacggcgatccccggggcgtccgcgcctttccagtgccactgcagccagcggccggagttgacgatagacccattctcttcggcgaagcaggtggagggcagacggaacacttcggtctggattttcgccggatcgacatcgttcgactcaccatggttttgccagaaggtggacgtttcggtattgagcgggtcgatagtcacgaggaacttcagcttcgacagggaagcgacgaccttgtttttgttcgggaacgaggcgaccgggttaaagccctggcaaatatagccattcactttgccctgattcatcatctcgaagtactgcagaacgtcgtagctcttatcccacttcggcagccagtcatagccccagctgttttccgcggtggctttgtcgccgaagaaggctttcatcatggagacgaagaacttcggatagttgccccagtagttgacctggtctttcagcagcggcttcggcgtgttagccgtcaggtaggtctgcaggtcggcctgtttttcgttcggcagcgacatgtagcctggcaggctggtggagagcaggccgaggtcggtcagaccctggatattggagtggccgcgcagggcgttgacgccgccgcccgccatccccatgttgccgagcagcagctggatcatcgccatggtgcggatattctgcgcaccgatggagtgctgggtccagccgagagcgtacaggaacgatgcggtcttatccggcgcgctggtttcagcaatgtattcacagactttgaggaagtcggccttcggcgtaccgcagatgttttcgaccacatccggggtataacgggaaacgtgctgttttagcagattccagacgcagcgtggatgctgcagcgtggtatcgcgtttggcgaagccgttttcatccagttcatagttccagctggttttgtcatactggcgtttttcggcatcgtagccgctgaacagaccatcatcaaagctgtagtcctcacgcacgatcaggctggcgttggtataggcttcggtgtattcgcggttgaatttttcgttattcagcagatacaggatcacgcccgacaggaaggtaatgtcggtaccggaacgaatcggggtatagaaatcagccaccgacgccgtacgcgtaaagcgcggatcgataacgatgagcttggcgccgttatgaattttggcttccatcgcccagcggaaccccaccggatgcgcttctgcggcgttaccgcccatcactacgaccaggttggcgtttttaatatcaacccagtggttggtcatcgcaccgcgaccaaatgttggagcaagacttgctaccgttggtccgtgtcagacacgcgcctggttatccaccgccagcatcccgagggcgcgggtgaatttttgcgttaaatagccggtttcgttactggaggcggaggcgcacagcatcccggtagtcaaccagcggttgacggtggtgccggcgtcgttttgcgcgataaagttggcgtcgcggtcctctttcatcagcttggcgatgcgatcgaacgcttcgtcccaactgatttgctgccatttatcggagcctggcgcgcgatattccgggaatttcaggcggctttcagaatggataaagtccaccagaccagcccctttcggacagagcgcaccacggttgaccggatgatccggatcgccttcgatatggaaaatggatgctttggcgtttttcgcgccgtcgccgaggctatacatcaacagcccacagccgacagaacagtatgtgcaggtgttacgggtttcgcgcgtgcgcagcaatttgtactgccgtgtctccgcgagcgcagttgccggggcaaagcccagcgctgctgccgtggttcccgccataccgccagcgcagatcttaaagaactgccttctgctgacctgcatggttcgctccttgtttcgacattgtcacatgtagttatttgctttgcggtgaaggccgcaaaggttcagaattagggcaaatttccctcattcctgaagggataaaaacagaataccacattgtgtgtatgcctgttccaatacggttaaagcaaagtgaacaagaagcctctcgaacaaatcaaaaatgtgacgaatgtcacaggatatcgccaggtctccctctggaaacgcgaggatctgcaacaccctcagccagatgagttagcggaagaggtgcccgtcgcgctggtctacaacggtatctcccacgtggtgatgatggcctccccgaaagatttggagcaattcgccgtcggcttctccttatccgaagggattatcgagcaccggcgggagattttcggcatggacgtggtagcggtgtgcaacggccttgaggtgcagattgagctctccagccggcgttttatgggcctcaaagcccggcgtcgcgcgctggccgggcgcaccggctgcggcgtatgcggcgtcgagcagctcaatgatattggtaagccggtccagccgctgccgttcactcagtcgttcgatttagccaatctcgatcaggccctggcgcatcttaacgactttcaaccggttggccggctcaccggctgtactcacgcggccgcgtgggtccggttgacgggcgaactggcgggcgggtttgaagacgttggccggcatgtcgccctggataaattgttgggccggcgggcggaagtcggcgaggggtggcagcatggcgccgcgctggtctccagccgcgccagctatgaaatggtgcagaaggccgcgatgtgcggcgtcgagatcctgttcgcggtctcggcggccaccaccttagcagtggaagttgccgagcgctgcaatctgacgctggtgggcttttgcaagccgggtagggcgacagtttacacccatccgcagcgtttaattgcgggttaaatattggtcaataaatttgaacaatgacagcaaatccttccgctttttgtttagcaatgtgcgggctactatttaacacatcaaggcacagcgccttatctaaacaactaaatgaaagggtttatattatgaaaagcatcaaaacttttgtcgcagtaatcgctatggccgcctctttcgcttccttcgctgctgaaaccgtgaccgcaaccgcctccacaatggacggcgcggaagcgaaaatcgccgcacaggcgcaggctgccggcgcttcgtcttacaaaatcaccgaagcgtttaccggcaaccgcgtgcatatgactgccgaactgaacaaataagcgtatagcaactgtcgaaagagcgcctcagggcgctttttttgtttttgttttccgcttcccgtctctgcgaaatttgccaatattttcctctgctacgaaaaaaatgtggcactaatcacgtttccgttcttttcttaaatcctcctttttatggcaaaggaaaggtcagcacgcctgaatatctcgattttttaacgccatgaaatttaaagaaataaaaaacagaaagcgatggagatcactctctttaaatgggatgtgtatcacaaaaataggtgtttcgccgtacctgtcaactattcactgcggtaatttaatacgcattatgtgatcttcattgcaaataaaaggcttgtactcagggaaaaatgttgtcaggcaaatgagcgaggatgcgtcatgaaaattggtatcgttattagcggcggggatgtttctggaatgaataattttatattccagatagccaggcaggctaatgctgatatcacgctgtttaatggcggtattccagggctactggagaaaagtcatcaggatatggcgtggcgcgatctggttgattattcaattaccgcggtgccgatcattacctcggggcgaaccagtcgcaaactgcagcgcagtgaatatgaaagcattgctaaaaaacttaaatctctgcgtattgatgtgctcattatggccgggggggatggcagcctgcagtttctgaatacccttagtgaatttgagattaattgctttggtgtgggaatgactatcgataatgatgtgtatggcagtgattatacgattggtttttccacggcctgtgagcaaattattaaagaagtctctcgtttaagaaataccggaagagcgctgcccggtcgggtttttatggttgagatattaggaggctattgtggagaactaacgttgcagtccgccattaaatgtaatgcggatattgccctgatcccggaggcacagatgccgttggccgtgctcgcggaacggattacccggaagctgagtacgcagaatagcgtcgttatcctctgctcagaaggctataccaaagagtactctcccggctttcagggggcgattgataccatgattaaacagctggaaccacaaataggtgtccgtatccgtaaaacgatcgtcggctatggtttacgcagcggtgatccaacctgcgaagagatttatcagggcactattatggccagtgaagtggttcgctgtattcagtcaggtatgaaaaataaagccataataattaattccagtaacaaacctattccgattgatttagtcagtatgaaaaaacgtctggtcgatactgaaggacatcattataaacttgccaagcaactcaatattatttgaggagaccctccatgctgaaaattttatgcgtatgtggctgcggcctcggttcaagctttgccattgaaatgacggcgaaggcagttttaaagaagctggaaattcccgctcatattgaacacaccaccgtttccgaagctggggcttttaaatcggatatgattctgacgcaaaaaacctttgccgacatcttaaccgccgatgccagtgaagaagaaattaaacgtgtcgtggtgttgaataaacttactgataaagaggagattgaaactaagatcgtcgcattcttaaaagaacgtcatctgaaggtggctgattatgaatagcttcgttgcgtttatcgttaaggatttactcggccaggcatccattcttattgcttttattgccatgcttggcctgatcctgcaaaagaaatcgccaggcaaaaccgcggaagggacatttaaaacgctgctcggtttcttaattatgatggccgggataaacatcattgtcgccacgctgaccttcctgaatgatatcttcacccagggatttggcatgaaaggctatattaccgatgtggccgccatcgccgggttagcgaatcgggaattaggttcggaggtggcgctgacgctgctggtgatctttgccgtcaatattattatcgcccggctgacgccgctgaaatatatttttctgaccggccaggcgctgctgtggatggcgacgatcggcgccgtgattggctataagtccgggctcaccggcgtaccgctgattttaaccgggggcatcttcggcggcgtgatggcggtgttaatgccggccctggcgcagccggtggtcaggcgcattatcgggtctgacgatgtggccctggggcacttctgtactatcggctatctggtgcaggctgcggtcgctaaagttgtcggaaaaggctctcgctccacggaagatctcgaactgcctgataactttaagtttctgcaggatacctatctggccatggcggtggtgatggtgccgatgtatctcatcccggctatcgcggcggggcctcagtacatcgcgcagttctccggcggcattaattacctgatgtatgccttcatgcagtccattcagtttgtcgccggggtctttgtcctctatagcggcgtgcgtttattactcaatgagctggtgccggcttttcgcggtatcgcgatgcgtattgtcccggatgcaaagcccgctctcgattgcccggtgctatttccctatgcaccgaatgcggtgattgttggatttctggcaacgactgtcggctcgattatcggcatgctggttttcccgatgttcggcctggcgatgattctccccgggctgttaaccaactttttcgccggcggtacggcaggggtatttggcaatgcgctgggcggacgtcgcggggcgatgatcggcggggtgattcacggcctgtttatcacattgctgccggccattctggtacccatgctggagagctacggctttacgggcgtcaccttcagcgattcagacgtcatcagctccggtctggtattaggccacgccttccagaataactggctctttgtcgccttgtttattgtgtttgtcgccgcactggcatggtttgtaaacggtaaatccgctaagccgaaaggggaaagtgttcatgagtctgtataattttaatgagattttaaaaatcgctcaggaaagagattttaaagcgattggctcgtttaacttgcactgtattgagatgttaccggctttttttaaagccgcgcaaaacagccgcagcccattaatgatccaaatatcaaccggtaccgcagagtatctggggtatcggttactggtcgatgccgtgcgttcattagcagacagtgaaaatatcccgacctgcctgcatctcgatcactgctccgatattaaagccatcgagacggcaatgaatgcgggcttttcttcggtgatgtacgacgggtctcacttaagcctcgaggaaaatatcggtaacacgcggattgtggtggaaatggcccggccgcggaatattacggtagaaggtgagctgggggcgatcggcgggtcagaggatggaaaagcggtggctgccgaagatatctgttttactaccgtcgaagacgcgacgcgttttgtgaaggagacacaggtcgatatgctggccgtctccgtgggcactgtgcatggcctgtacaccggtaaagcgcagatacagcatgcgcggctgaaggcgataagcgaagcgacgggcgtgccgctggtgctgcatggcggcacaggtgtcagcgatgaggatatgcggctggccgtcaccgaagggattaataaagtgaacgtcggaacggaaatgaacgtgcagtgggtcgaccgctgtaaatcaacgtttgagaaaggaaaagtaaatgacagcgtacggaaatttttaattcccgccaaccaggcagttactgccgtattaatggaaaaaatggcgctatttaagtagcgtttttaccgacacatatcttttgttgccctgtcttccgccagggagggagcttgctatgtttgaatcattgaaaacgctgtggaaaaaagagcaaaacccgctgcaggattatgatcaacagtcccgtcagctggcggaagagatcgccagactggaaggcgaattacagcgccagcccgataatagcgacgtgcaaaaaacattgatgttgacttacaaccgggcattatcggtatatgccaaaagtaagagccaccggcaggatatcgatgcgctgtttctgcagattgataatttacgcaatattattcgccgcaatatctaggaacagagaatgaccataaaagaactgcttattgaggccgatgccattcaggttggcgttgtggagtccgactggcagcgggtaataaagctggctgcccgcccgctggaggcaaaaggctttatttcgacggaatatagccaggcggtgatcgacaatactttaaatcatggcgcttattacgtttttgatgaagggattgccatcccccatgcccgccccgaatgcggcgtcagacgcaactgctttagcctggtggtgctggaaaagcctattccctttgcggacagtgaaaaagcggacattgttattatgtttggcgcccgggacagcaatgcgcatatcgaggagggcatccgttccatcgtcgcgctgctggataataatgacaccatggccaaactgcggacggcccgcagccgggaggaggttgtcgcattactatgaacagacatctgaccccaggctgcaaaacggccattttaatcaacggcattccggcgtcggggaagagcaccattacccgtttgctggcggagacctttagcctgccggtattgacgatcgacggcatcaaagagccgtttatggcgcgcctggcccctgtcgaccggccgatgaatcgccagctgggctgcgcggcgtatgaggtgatctggtcgattgtcggcgcatcgcctgccagcatggtctggttgatcgacgcctggttcggctttcagccgcgggagaccttgcagagactgctacagcaggcgggcgtggagcaggtgattgaggtctggaaccatatctctccggagctggccgtcgcgcgctatgcctcgcggctggcgacgcggccgccgggccaccccggagaagagtatttgccggagctggcccagctggccgggcgggcgcagcccatgtcgttaggacctgtactgacgatagaccagcggcacccgctgcaaatcgaaccggttattcagtggcttgaaggcacgatcgccggacagcacagcggttttacagattacgcttactcgtcctagggcatacccgccaggcgcagcagcgcggtcaccacggcggcggcgataatcacgccgatcagcgggaccttgcgccaggcgaggaacacagcgaaagcaacgcccagaacgcgcgccataccggcgaaatgtgcgccctcatagaaagtggtggccagggcgacggaaaaaagcagcaccgtcgccgcatcggaaagcagcgcctgcgagcgctcggaaaatgccagccgattgccgagcttcgcgccgccgagacgcatcagataggttcccagcgacaggatggcgataccggcgataaacagcgtcatattgcccattattttttcctcgacagtaaaccgaacagcgaaagcagcaccggcagcccggtgggcacaaacggtacggcggcaagcgccagcgcggcgccgctggcggcgcggatcagcgtagtgcggtttttaaaggccgggatcaccagcgccagcaggatcgccgggaagaccgcatcaagcccgatggtttccggcgctggcagcagtttgccgacggccgcgccggttagcgtaccgaggggccagatcagcgcgacgccagcgccgcacagccagtaggccgctttgcgctgcgcgggggtgggctgcgacaagccaaagaccacgctctcgtcgttcataatgtggcacccgataaagcttaaggcgcgccgaccaaccagttcgcgtacggtcaccccgaacgggatatgacgcgcattgactaacaggccggcggcggcggcggccagcggactaccgccgctggcgacaatgccgataaacataaattcagaggcgcccgccagcaccgacaccgaaagcaagagcggcacccataaagggaagccgtaagccaccgccagcgacccataggacatgcccaccaccccgacggcaaggcagaccaaaacaatcgattttatcgtgtctccgctgagactggagagagtttgtttcatatcacttagccatatcgaacgaatttccattataatgaacacataatgatcgtttttcaaggcgaacgaattgttcgatataaaaaacaaggggcgggtatgacacagccaatcagcgttatcgccaaaagtctggtgcgggagcgggcgcggaccgggctttcgctggcggaagtcgcgcgtcgggcgggtatcgcaaaatccacgctatcgcaactggagtccggcaacggcaacccgagtctggaaacgctgtggtcgctctgcgtagcgctggatattccatttgccaggctgcttgagccgcaggtgaacaaaacgcaggtgatccgccgcggcgaggggaccaaagtggtggcagagcaggcgaactatcaggccattttgctggccgcctgtccgcccggcgcgcgtcgggacatctatttgctgctcacccagcccggcgccgaccgcatttcgcatccgcatccgccaggctcggtggaacatattatcgtcacccaggggcgggcgcgggtagggctgacgtcggcgccggaagagctcggcgagggcgactatatctgctacccggcggatcaggagcatgtttttcaggcgctggagccggatacgcaggccctgctgatcgctgagcaaaactgacatcgcgtcggcgggggacgcgcgctcgctggacgtcatagccatattgcgggaaactagctttcctatgcgaaaacagggatttttatgtcgctgaaagccattgccaaacaacttgggatctccgtcacgaccgtcagccgggcgttgaacggctacgacgatgtgtcgcaggagacccgcgcccgggttgaggctgaagcgcagcgccggggctatcgccccaacactttcgcccgccgtctgaaaatgggcaccatcgatgccgttggtctcgtcttccctgtccgccccgcgccgctcaacaataacgtttttctcgagatggtcggggagatcagccatgagctggcgcgccatgacattgatttgttgctgatcgccgatgatgagcaggcggataaacatggctatatgcgcatggtgcagggccgtcgcgtcgatgcattaatcgtggcccatactctggatgacgatccgcggctggcgcagctgcaggcctccggctttccgtttctggcgctcggccgtagccgcctggcgcagccctacgcctggtttgatttcgataactatgccggcacctgccgcgccacccgccatctgattcaacagggccaccagcgtatcgctctgctgggcgagaacaacaatcaggcgtttattttgcaaaggcgtaacggctacctcgatgccctgcgcgaggcggggttatccgatgcatggctgcgtagcgtgccggcgacgcgccgcggcggctatcaggccacgctggagctgctgcgtctgcctgagccgcctaccgcgattatcaccgactgcaacacccatggcgatggcgccgcgatggcgctcgcccacctggggcgtttaaccggcgacaaccgcgtcgccctggtggtgtacgacgggctgccgcaggacagcatcattgagaccgatgtcgccgcggtgatccagtccacgcgccagggcgtgggaaggcagattgccgatatggtgcgtcgcttaatcgccggggaggatctcgccacgctgcaggtgctatggcagccggaatttatcccgggtgaaaccgcctgatcttatccctttttaacccgtaattctgaagccgatcacggatccgaaacgttttggttggcatccgaaacgtttcggatcaacagtaagacattccttgtgatggagatgtctgatgtctgattcgctgattcacctgcaaagcgccggtgccgatgttgtgattaaaacccgccctttcgccgaaattgtctactggggaccgcatttaagccacttttcgccgcaggatgccgacagcctgacgcgcccggtcgccaacggtagactggatgtcgattcgccagtgaccttaatggcggagctgggccatggtctgtttggcgcgccgggcattgaaggccatcgtcaggggctggatgcctctccgctgttcaccaccagcgaagtgcggcacgagggccagacgctgaccctggtcagcgaagatccgcaggccggcctgcgcctgcagagcgagatcgcgttggatgccagcggcgtgctgagcgtgcgccatggcgtgaccaatctgcgcgccagcccatggcaggtggatcgcctggcggtcacgctgccggtcgccgaacgcgctcgcgaggtgatggctttccatggccgctggatccgcgagtttcagcctcaccgcctgacgcttgagcacgacagctttgtgctggagaaccgccgcgggcgcacctctcacgaacatttcccggccctgatcaccggcagccgcgcctttagcgagatgcagggtgaagtctggggcgtgcatctggcctggagcggtaaccatcgcctgcgggcggaggtgaaaaccgatggccgtcgctatctgcaggccgaggcgctctatctgccgggcgaaatggcgctggcggaaggggaaaccttgtggacgccgtacctgtatgccagctactcggcgaatgggctgaacggcatgagccagcagttccatcgttatctgcgcgaacggattattcgtttcccgggcaacaaaccgcgcccggtgcatctcaacacctgggaggggatctatttcgaccacgacccggactacatcatgcgtatggccgacgaagcggcggccctgggcgtcgagcgctttattatcgatgacggctggtttaaagggcgcaacgacgactgggcggcgcttggcgactggtatctcgatgagaaaaaatacccctacggcctgacgccggttatcgatcacgtgaagtctctgggtatggaattcggtatctgggtggagccggaaatgattaacccggattccgatctgtaccgggcgcacccggactgggtgctggcgctgccgggctataccccgctgaccggccgccatcagtttgtcctgaacctcaacattcccgaagcgtttgattatctgctggagcggatgagctggctgctgggcgagcatgcggtggactacgtgaagtgggatatgaaccgcgagctggtgcagcctgggcatcagggacgcgccgctgcggacgcgcaaacgcgccagttctaccgcctgctggatacgctggtggcccgtttcccgcacattgaatttgaatcctgctcctccggcggcggacggatcgattatgaagtcctcaaacgcagccatcgcttctgggcgtctgacaacaatgacgcccttgagcgcaacaccatccagcgcggcatgagctacttctttccacccgaggtaatgggcgcgcatattggcaatcgccactgtcatgccaccttccgccagcatagtatcgccttccgcggcctgacggcgctgttcggtcatatgggccttgagctggatccggtgagcgccgatgaagaagagcgcgccggataccgaaaatatgcggccctgcataaacagtggcgcgacgtgatccatcacggcgtgcagtggcgaatagatatgccggacgccaccacccttgcccatggcgtcgtcagcccggataaagcgcaggcgatcttcctcgttagccagctggcgatgccggactacaccctgatggcgcccctgcgcctggcgggcctggaggcgagcgcccgctatcaggtgacgctcctcgatcatccgaacattcagatcaccggtgagggcggccacaccatgcggaagctgccggcatggatgacgacgccgcagacggtgagcggtgagtggctgcagcaggcggggctggcgctacccatcctcgacccggaaagcgccattctgattggtctgcaacgcgtgtgatggtatcgggccgcgctgcggcccttcttgaggaaaatataatgaacccgaccgtctgtacccacaaaaacaaccccaacttctggattttcgggctgttcttctttctctacttcttcatcatggccacctgctttccgtttctgccgatctggctgtcggacgtcatcggcctgaataaaaccgaaaccggcctcgttttctccagcctgtcgctgttcgccatctgtttccagccgatcctcggagtgatctctgacaagctggggctgaaaaaacacctgatgtggatcgtgaccgttctgctggtgctgattgctcccttcttcctttatgttttcgctccgctgctgaaaaccaatatctggctcggggcgctgagcggcggcgcctatatcggctttgcattctccgcaggcgccggcgcgatggaggcctatatcgaacgggtaagccgcaacagcgggtttgaatacggcaaggcgcgcacctttggctgcctgggatgggcgctgtgcgcgactaccgccggaatgctgttcagcattaatcccgaatgggtgttctggatggggtcagccgccgcgctgctgctggtggtgctggtggccatcgccaaaccgcaggccagtcagtccgcgcaggtgatggattcgctcggcgccaatcgcccggcgatcgatttaaaaacggcggtgcgcatgttccgccagcgtaagatgtggatgtttattctgtatgttatcggcgtggcctgcgtgtatgacgttttcgatcagcagttcgccaccttcttcaaatcgttcttcgcgaccccggaagcgggcacccgcgcctttggtttcgccaccaccgcgggagaaatatgtaacgccatcattatgttcagctcgccgtggattattaaccgtatcggagcgaagaataccctgctgatcgccgggatggtgatggcggcaagaatgattggctcttccttcgccaccaccgccgcggaagtcgtagcgttgaaaatgctccatgcgctggaggtgccgttcctgctggtgggcgcctttaaatacatcaccggcgtgtttgacgtccggctgtcggcgactatttatctggtgggcttccagttcgccaagcaggtggcggcgatcttcctctccgccttcgccggcaatatgtacgatcggatcggctttcaggatacctacatgatcctcggcggtattgccctgaccgtcaccttaatatccgcgtttacgttagcgggtaagacgaaaaccgagccgctgcgcgataatgcaatgaccgtttaaacgaccggcctcccgtctggagggaggccagttatttttacgccagataaaacacttctttgagctccgcgctcagcgggctgttgtccgggttgctgggcatcacctcgcgcatgtatttccaccaacgctggcatacttccgtgctggcgaccgcttcccagcgggcttccgattcaatctccaccgtcgcgaacaggagatggcgttctttatcgagataaatggcgtagtggtgcgcgccgtgatccttcaacactgcctccagctccggccagatggggttatggcggcgctggtactcctcgtgcgcgtcggggttcacctgcatgacgaaggctttacggatcataaggcctccagatagagctcgcgaacctcatcgcggctggcggggcgcgggttacacggcgcgcatgggtcggccagcgctttatccagccagccttcgatatcggctttgctgacgccaagctggctaaaaccctgggggatccctacgcgtttgctcagcgtgcggatggcattgatggcctccatgctggcagcttcatcgctcatgccgcgagtatcgacgcccatcgcctgcgccacgcgggcaaagcgcgccaccgcgttcgggcggttaaagttttcgatgatcggcagcaggatggcgttgcataccccgtgcggcaggttgtgggtggcgccaggctgatgggccagggcatgtaccagcccgagaccggcgctgttgaacgccatgcccgccagatactggccaaaggccatctgctcgcgggcctgcagatcgtgcccatcgtctaccgctttcggcagccacaggttaatcagacgaatggcctcgagggcgttggcgtcggtcagcggatgggcgccaacggagacaaaggcctcgatggcgtgggtcagggcatccatgccggtggcggcggtaacggctggcggaatgtcgagcatcacgctggcgtcgtcgacggcgatatccgggatcaggttcgggtcgataatcacctctttcacctgccgctcgctatcgataattaccgcgttgctggtcatctccgccgccgtgccggcggtggtattgatggccaccagcggcacgccagcgtttttcactttgccgacgccggagtaggcggtggaggggcctgggttggcggtgaggatttttatcgctttggcggtatcaatcgggctaccgccgccgaaggcgatcaggtaatcgcagcgggccgcctggtaagccgcatagccttgctgcaccagcgcttcggtggggttggggaatacctcgtcaaatagctgataagccatctgctgttcatccagcgcggcgaacaggctgtccagcaggcccagcttcaccagctgaccgtcggtgacgatcagcgccttgccccactgtttgcccgctaccagcttgaccatatcaccgatcgcgcctgcgccgtggaggctgattttaggtagtgccaacataaaactcatgataattctccttaatgttgattttgggaaatccgtttcccctcaccccgaccctctcccgcagggagggggccaaggtgagggggaaattaacatcgtcttcgctgcatcatccgccgggtaataatcggcagggagatcaccacgatcagcatggcgccgataatcaccgacatcacgatgccggggacgttcagcaggctcaggccgaaggtcaccagccccatcagaaaggcggcgatgatcaccccgggcatgctgccggagccgccgagaatattgacgccgccgagcaccgccatggtgacaaccgccagctcccagcccatcgccagggtggggcgggtactgccgagccgtgaggtcagcaggaccgccgccagcccggccatcagcccaaccagcgcgaacagcaccaggttatgacgcttaacgttaatcccggagaaccaggcgccggtcgggtt

SEQ ID NO: 2 - DNA, 128638 bp, Klebsiella pneumoniae
  misc_feature: Plasmid DNA
atgccctgtacgaaatcgcctccatgcgcctgtttgcccgattatccctggatagcgccctgccggatcgcaccaccatcatgaatttccgccacctgctcgagcagcatcaactggcccgtcaattgttcaagaccatcaatcgctggctggccgaagcaggcgtcatgatgacccaaggcactttggtggatgccaccatcattgaggcacccagctctaccaagaacaaagagcagcaacgcgatccggagatgcatcagaccaagaaaggcaatcagtggcactttggcatgaaggcccacattggtgtcgatgccaagagtggcctgacccacagcctggtcaccaccgcggccaacgagcatgacctcaatcagctgggtaatctgctgcatggagaggagcaatttgtctcagccgatgccggctaccaaggagcgccacagcgcgaggagctggccgaggtggatgtggactggctgatcgccgagcgtcccggcaaggtaaaaaccttgaagcagcatccgcgcaagaacaaaacggccatcaacatcgaatacatgaaagccagcatccgtgccagggtggagcacccgtttcgcatcatcaagcggcagttcggcttcgtgaaagccagatacaaggggctgctgaaaaacgataaccaactggcgatgttattcaccctggccaacctgtttcgggtggaccaaatgatacgtcagtgggagagatctcagtaaaaaccggaaataacgccagaaatggtggaaaaaatagcctaaataggctgattcgatgtgtttgcgggaaaaaaatcggcccagatccgcgaaattttaatcaacgagtcagcttgggaagaaatgacctgcttattcgcactttccctaaaggcgcattcaggttgaagggcgaacagattgacggcagttttctgttaaataatgaaacctatcttgtggaagcaaagtggcatagcactaaaacaggaaacgctgatctccatgcatttcatggcaagctggatcagaaaatttcatgggctcgcggcgtatttatcagttgggctggatttacaaaaagtggtctggatgcatgggggaggggaaagaaggtcatctgtgtcagcggttatgatcttgttctcatgttaaaaaataacatcagtttcagaatgttgatggaagaaaaaatcagacgggcagccgaaactggcaacttatatatcaagatagacgaaatttatccaaacataagcaaatgatgcttcctgtcctgtctacaatcagcgtaactggtgggattacagctccacaccttgcagcattagcacttcagcttgagcggataaaaactatggtagaattcaaaaaaaatagctggggatgacagtggctaagtaccatattgaatctgtgcaggaatgggcgccgtttactcacaacggccagagttactctttgtcacatttgaatgcacatgagattacctacaaaggtaagatgcaagattttaagtttgtcgtaacttatggcatgcactgcttcactaaagacggtacgccttacaacatcccctttaaatatcaagatgcgagagagtcgatctccgtttgtcttgaacggtatgaagcatcaaagcaactgcaacacattctgcccaaccttccatcgttgatgctctatcagaccactgaagaaaagtatttcacgcttcagatgatgaatagtgctacgaaccagcttgagccatacaagatctgcgttgcattcttcaaagagaaccgtttgatgcgtatacacgttctttcggcattttttgctcgtactggacctggtgcaccgggcgagcctatcccgcaaaagccagttagcttatttaaggttgctgtggatacggcaaaaaagccaagaaacagtggacgaccgaaggaagttaacaacaggtgagaaagtggcggccccctttcgggggcctcagccatttagtttgattagataatcaagactaaacagggcaggtcgcatttgcttcgaactggtcgaaccgtttccggctgcgggatgcgattcattgctgaacccctgtaaccatccgttattagtattctattatctgacgtagataagtcaagtaatgtagttcttactgccgcaaggactttctgaagaagatagtacatcttgtcggaagttaggagtaattacttgagtaagaagatgtagttctatcaggtacgcacagtgcacacaaagaaacaagttatccgctgtgaagatgttcaagatagacgagcaagattagcttaaaaaaacagccttagcgtaaaataattatcgatatccaagctgcccggcactgttgcaaatagtcggtggtgataaacttatcatccccttttgctgatggagctgcacatgaacccattcaaaggccggcattttcagcgtgacatcattctgtgggccgtacgctggtactgcaaatacggcatcagttaccgtgagctgcaggagatgctggctgaacgcggagtgaatgtcgatcactccacgatttaccgctgggttcagcgttatgcgcctgaaatggaaaaacggctgcgctggtactggcgtaacccttccgatctttgcccgtggcacatggatgaaacctacgtgaaggtcaatggccgctgggcgtatctgtaccgggccgtcgacagccggggccgcactgtcgatttttatctctcctcccgtcgtaacagcaaagctgcataccggtttctgggtaaaatcctcaacaacgtgaagaagtggcagatcccgcgattcatcaacacggataaagcgcccgcctatggtcgcgcgcttgctctgctcaaacgcgaaggccggtgcccgtctgacgttgaacaccgacagattaagtaccggaacaacgtgattgaatgcgatcatggcaaactgaaacggataatcggcgccacgctgggatttaaatccatgaagacggcttacgccaccatcaaaggtattgaggtgatgcgtgcactacgcaaaggccaggcctcagcattttattatggtgatcccctgggcgaaatgcgcctggtaagcagagtttttgaaatgtaaggcctttgaataagacaaaaggctgcctcatcgctaactttgcaacagtgccaattacagattacggttaaaatataaaaaaaagccaccaatcctgccggatacggtggcttaaatacagaattaattaatttatttcagtatgttatcacacatcagctgaagtgtattgataaaccttgctgcatgaaaaccatcacagactgcatgatgaacctgtacagaaacaggtaatagtacgcggtcaccttcctgctgaaactttgccattgtaaaaaccggggaaaaataatcatcatttccggtgatattcagattaaatccgtcaaaactcacccagggtaacgatgatatattcaggtgattctccggtaaatttccctgcggaaacaacctggtatcatgctgatattctgctgttaccgcgttataacccgccataaactcactgagatccggaaaataacggcaggacagtgcggagaatgtttcggtttctttatgaaagacagtaaagaccgggtctgactgttcccagtaaatcagttcattatctttcattgccatccggaactccggaaactgattaacagcccgggagatcaggtaaatcatcagcggataaaacttataaccggttttcgccagtgcagtacgcaaagcggtaatatcgagtttggtggtcaggctgaatccgcatttaatctgctgacgataaagggcaaaatgttccctgcgattccaggtattcaggtcaatccgggtaaaattcatggttattccttctgattaatagtgaaaaatattaataatcagaaggcagtctggttgtctcaatgggtaacattccgtcctccgtaagctgtctggtattcagtaataatacccgatacgggcttaatctgtattaagcccggttttatttattccggccactcatccgcaaatacatagcggatcagttctgcggattcacggggcggtgctctcagcacatccgccattaaatcaatttccatctgacaggtttgcagcttgtcttccgccagcacatacggatcatccgtcaggaaactatcgccgtatttatccaccgacccctgtatttgtgccgaaaataatgactgaatttcatcagcggaataatgcgcaaccggagccccttcaccggctgaattcaccagatccagcaacgctctgttaccgataataaagtcacggtacccggcggaagcctttttcatatccggcgggccagacacttccggatgcagcacacgaaagcagaagtcaccggaggtatcctgcgccagtgctttctgcaaaaattccagccgcattttcccgtaattaatcaccgcgtcatcccccgcgagataaagcagttttttaatattttcggtggcccactgttgcaggcgcatatagtactctaaacagggcactgttgcaaatagtcggtggtgataaacttatcatccccttttgctgatggagctgcacatgaacccattcaaaggccggcattttcagcgtgacatcattctgtgggccgtacgctggtactgcaaatacggcatcagttaccgtgagctgcaggagatgctggctgaacgcggagtgaatgtcgatcactccacgatttaccgctgggttcagcgttatgcgcctgaaatggaaaaacggctgcgctggtactggcgtaacccttccgatctttgcccgtggcacatggatgaaacctacgtgaaggtcaatggccgctgggcgtatctgtaccgggccgtcgacagccggggccgcactgtcgatttttatctctcctcccgtcgtaacagcaaagctgcataccggtttctgggtaaaatcctcaacaacgtgaagaagtggcagatcccgcgattcatcaacacggataaagcgcccgcctatggtcgcgcgcttgctctgctcaaacgcgaaggccggtgcccgtctgacgttgaacaccgacagattaagtaccggaacaacgtgattgaatgcgatcatggcaaactgaaacggataatcggcgccacgctgggatttaaatccatgaagacggcttacgccaccatcaaaggtattgaggtgatgcgtgcactacgcaaaggccaggcctcagcattttattatggtgatcccctgggcgaaatgcgcctggtaagcagagtttttgaaatgtaaggcctttgaataagacaaaaggctgcctcatcgctaactttgcaacagtgccgcgcgacgagcagcagcaccaggagcagaagcacgtcgagaaaaagcaacagcagatcgagcagcgcccacggcgggccgctcgcatcggataagtcgaaaaatccggctaaagtggccgagctgcacatcaggccgcgcggttttcctccctgatcgccggcgcggtttcttcctccctgaaccgcatgcagacttgccgcctcggacaccccgaggcggttttttttcgcctcgctcgagcatcgccgcatccgacgatgccgagacgaccaggccgcgcacgtcgagctgcagcatcgccattgccgacgatggcaccaggtcgccggcggtggccaccgacctcgagctcgcatcgccacatccgacgatgcgcgccggcgtcgaccatcgccaggtctgacgatggcggccgccctgccctggatctcgcatcgccatttctggcgatgagatccacggagcggccatttagacccgccaataacgacccggccaagataaatcgcatgacggcctttttggccgggggtagcatgaccggacactttgcgtatgcccaaaggagcccgcaagtatgcgcaggacgaagccagtagccgcgccgatggtggcgcgggtctatctgcgcgtcagcaccgacgcgcaggacttggaacgccaagaggcgatcactacggccgcgaaggccgccggctactacgtcgccggcatctaccgtgagaaggcatccggcgcacgcgccgaccggcctgagctgctgcgcatgatcggcgacctacagcccggcgaggtggtcattgccgagaagatcgaccgcatcagccgcctacctttgcccgaggccgagcgcctggtggcctcgatacaggccaaaggcgcaagcctggccgtccctggcgtggtcgatctatccgacctggcggccgaggcccagggcgtcgccaagatcgtgctggaagccgtgcagatcatgctttttcgcctggccttgcagatggcccgcgacgactacgaggacaggcgcgaacgccagcgccaaggcattgagttggcccgccaggccgggcggtacaagggccgccgtgctgatccgaagcgccgcgcccaagttgtcgcgctgcgcaagtccggctacagcatcaacaagaccgccgagctggccgggtacagtgcggcccaggtgaaacggatatgggccgaggtcagccaggccgaagcgaagcagcacggcgcgttcgtggaggacgcattgacggaagccgatgccctggccgctgtcggccaggatgagcgccaggaggaaagggcatgaagaagccgaaccaagacgacgagccgtttttcatcaccgaggagattgcggccgaaatgatcgccggcggctatgagttcgagctgccgcccattccttgcaccatccgcctacgcgacgtgctggagcgcatgaccgatgctgagctagcattgcagccgggcgagatcgccgaccaggagcgtgaacgctgccggcgcaagccgtgttcaacctcatgatctggtcatggtatttttcatggcactgagcctgatagttcttgcaaattgttgtcactaaagggttttgtgtgcttgtttacaatcgagtgggtatcggagacgaagaaggacaaggtacatgctgaccgataccaagctgcgcaatctcaagcccagggacaaactctacaaagtgaatgaccgggaaggtctctatgtgggggtcgcctcagaaaacggaatctatggtcactcccgtttttgcaacaccgattttgacgacaagttggcttgcttgaatctatccggcgtctgaatgggattttattcccgcgcctcgatgagttccgcgcctgatgaacctccagaaaatatacggcttcaatgagcctttccgttttacaggttcctcaacaggccggtgggccgttagtatcatcaatatcagtattcgcaaaaccagatgaatgattgtttaaactggtgtatttctgcctttatgcttcgtaagtttgctgtcgcgccgtcagtgcccaggctattctggccagcttgtttgccagagcacaggtgacgacaaagttgcttttccgacacaacaactccctgacccagtcggccaacttgccagactggtgttccagtttttgtatgaataccctggcacactgaaccaacaaagttcggatctttttgttgccccgcttgctaatccctaacaatgtcgtccgacctcccgtgctgtactgtcggggtaccagccctgttgccgccgcaaagtcacggctgctggcgtactgcttcccgtcgccaatctcagttgaaatagtactggcagtcagcgttccaacgcagggaatactcagcaagcgctgtccaacctcatcttcgtccaactttcgtttcaactgagattccagatctttaatctgctcaacaagatagtgataatgctgttgtaatttcagcagtaactggctgagataaagaggcaaactactgtcctcaagaagggtactcagtcgactaataacggcagcacctcgcggaacgctgataccaaattccagcagaaaagcatgcatctgattagttgttttcaccttatcctgaaccagggattcacggacacgatgcagagctcgcattgcctgctgagattcggttctgggctgcacgaaacgcatagatggacgtgatgctgcttcacagatagcttcagcatcaacgaagtcatttttgttgcttttaacgaatgggcggacaaattgcggtgatatcagctttggaaaatgccctaactcttccagcttgcgtgccataaagtgagaaccgccacaggcttccatcgcgatggttgttgccgggcatgtcgccagaaattcgattagctttggtcgggtgaattttttacggtaaacggccttcccacgatgatcctgacaatgaatatggaaagagttcttacccagatcgataccaataagcgcaatgttttccatgatggttctccgaatgaaagcctgtcctcagcatagtactgggaaggagggagtgaccatctcattaaataaagcacgctaaggcatagctgaccttgccaggcctgcttcgccctgtagtgacgcgatcaacgggcaggaaacattcccctttcgtgcatggcaggcgcacacgagttcagacagcacggtttccatgcgcgccaagtcggccatcttctcgcgcacgtccttgagcttgtgttcggccaggctgctggcctcctcgcagtgggtgccatcgtcgagccgcaacagctcggcaatctcgtccagactgaaccccagccgctgtgccgatttcacgaatttcacccgaaccacgtccgcctccccatagcggcggatgctgccgtaaggcttgtccggttcccgcaacaggcccttgcgctgatagaagcggattgtctccacgttgaccccggccgccttggcaaaaacgccaatggtcaggttttccaaattattttccatatcgcttgactccgtacatgagtacggaagtaaggttacgctatccaatccaaattcaaaagggccaacgtatgtctgaaccacaaaacgggcgcggtgcgctcttcgccggcgggctggccgccattcttgcatcgacctgctgcctggggccgctagtactggtcgccctgggcttctccggtgcttggatcggcaacctgacggtgctggaaccctatcgaccgttgttcatcggcgcggcgctagtggcgctgttcttcgcctggaagcggatttaccggcccgtgcaggcatgcaagccaggtgaggtctgcgcgattccgcaggtgcgcgccacctacaagctgattttctggatcgtggccgtgctggtcctggtcgcgcttggatttccctatgtcgttccatttttctattaaccaggagttcatcatgaagaaactgtttgcctcccttgccctcgccgccgctgttgccccggtgtgggccgctacccagaccgtcacgctagcggttcccggcatgacttgcgccgcctgcccgatcacagtcaagaaagcgctctccaaggtcgaaggcgtgagcaaggtcgatgtgggcttcgagaagcgcgaggccgtcgtcacttttgacgacaccaaggccagcgtacagaagctgaccaaggccaccgcagacgccggctatccgtccagcgtcaagcagtgagccagcaagccaacgacaacagcgagagccgcttcatgggactgatgacacgcattgccgataaaaccggcgcgctcggcagcgtcgtttccgcgatgggctgcgccgcctgctttccagccctcgccagcttcggcgcggccatcgggctgggcttcttgagccagtacgagggactgttcatcagccgcctgctgccgctgtttgccgcgctggccttcctggcgaacgcgctgggttggttcagtcatcggcaatggctgcgcagtctgctcggcatgatcggcccggccatcgtgtttgcggccacggtctggctgctcggcaactggtggacggcgaacctgatgtacgtcggcctggccttgatgattggggtgtcgatctgggacttcgtgtcgccggcgcatcgccgttgcggaccggacggctgcgaactccccgccaagcgcttgtgaaagacggctgaccgtgcgacacggcggcccacacgaataaggaacgatggtatgagcactctcaaaatcaccggcatgacttgcgactcgtgcgcagtgcatgtcaaggacgccctggagaaagtgcccggcgtgcaatcagcggatgtctcctacgccaagggcagcgccaagctcgccattgaggtcggcacgtcacccgacgcgctgacggccgctgtagctggactcggttatcgggccacgctggccgatgccccctcagtttcgacgccgggcggattgctcgacaagatgcgcgatctgctgggcagaaacgacaagacgggtagcagcggcgcattgcatatcgccgtcatcggcagcggcggggccgcgatggcagcggcgctgaaggccgtcgagcaaggcgcacgtgtcacgctgatcgagcgcggcaccatcggcggcacctgcgtcaatgtcggttgtgtgccgtccaagatcatgatccgcgccgcccatatcgcccatctgcgccgggaaagcccgttcgatggcggcatcgccgctaccacgccgaccatccagcgcacggcgctgctggcccagcagcaggcccgcgtcgatgaactgcgccacgccaagtacgaaggcatcttggagggcaatccggcgatcactgtgctgcacggctccgcccgctttaaggacaatcgcaacctgatcgtgcaactcaacgacggcggcgagcgcgtggtggcattcgaccgctgcctgatcgccaccggcgcgagcccggccgtgccgccgattcccggcctgaaagacactccgtactggacttccactgaagcgctggtcagcgagacgattcctaagcgcctggccgtgattggctcatcagtggtggcgctggagctggcgcaggcgttcgcccgactcggagcgaaggtgacgatcctggctcgcagcacgctgttcttccgcgaagacccagctataggcgaagccgtcacggccgcattccgcatggagggcatcgaggtgagggaacacacccaggccagccaggtcgcgtatatcaatggtgaaggggacggcgaattcgtgctcaccacggcgcacggcgaactgcgcgccgacaagctgctggtcgccaccggccgcgcgcccaacacacgcaagctggcactggatgcgacgggcgtcacgctcaccccgcaaggcgctatcgtcatcgaccccggcatgcgtacaagcgtggaacacatctacgccgcaggcgactgcaccgaccagccgcagttcgtctatgtggcggcagcggccggcactcgcgccgcgatcaacatgaccggcggtgacgcggccctgaacctgaccgcgatgccggccgtggtgttcaccgacccgcaagtggcgaccgtaggctacagcgaggcggaagcgcaccatgacggcatcaaaactgatagtcgcacgctaacgctggacaacgtgccgcgcgcgctcgccaacttcgacacgcgcggcttcatcaaactggtggttgaagaaggcagcggacgactgatcggcgtgcaggcagtggccccggaagcgggcgaactgatccagacggccgcactggcgattcgcaaccggatgacggtgcaggaactggccgaccagttgttcccctacctgacgatggtcgaagggttgaagctcgcggcgcagaccttcaacaaggatgtgaagcagctttcctgctgcgccgggtgaggacaaggaggtgtgcgatgagcgcctacacggtatcgcaactggcccataacgctggggtgagcgtacatatcgtgcgcgactacctggtgcgcggcttgttacggccggtggcctgcaccacgggcggctacggcgtgttcgacgatgcggccttgcaacggctgtgcttcgtgcgcgcggccttcgaggcgggtatcggcctggatgccctggcgcggctgtgccgtgcgctcgacgcagcggacggcgcacaagccgcagcgcagcttgccgtgctgcgccagttggtcgagcggcggcgcgcggcgttggcccatctggacgcgcaactggcctccatgccagccgagcgggcgcacgaggaggcattgccgtgaacgcccctgacaaactgccgcccgagacgcgccaacccgtttccggctacctgtggggtgcgctggccgtgttgacctgcccctgccatctgccgattctcgccgccgtgctggccgggacgaccgccggtgccttccttggcgagcattggggtgttgccgcgctcgcgctgaccggcttgttcgttctggccgtaacgcggctgctgcgcgccttccggggcggatcatgacgagttcgcagcccgccggatggacggcggccgagttggcgcaggcggcggcgcgcggacagcttgacctgcattaccagccgctggtcgatctgcgcgatcaccggatcgctggcgcggaagcgttgatgcgctggcggcatccgaggcttggcctgttgccgcccggccagttcctgccgctggccgagtcgttcggcctgatgccggaaataggcgcgtgggtgctgggcgaggcctgtcgccagatgcacaagtggcaaggaccggcatggcaaccgttccgtcttgccatcaatgtgtccgccagccaggttgggccaacgttcgacgacgaggtaaagcgggtgctggccgatatggccctgcccgccgagcttctggagatcgaactgaccgaatcggtcgcattcggcaatccagccctgttcgccagtttcgacgccttgcgcgccatcggcgtgcgcttcgccgccgacgacttcggcaccggctattcctgcctgcaacatctgaaatgctgccccatcaccacattgaaaatcgaccaatcctttgtcgccaggctcccggatgatgcccgtgaccaaactatcgtgcgggcggtgatccagctcgcgcacgggctgggcatggatgtcattttcagaagacgactgcaccagttgattgggcgtaatggctgttgtgcagccagctcctgacagttcaatatcagaagtgatctgcaccaatctcgactatgctcaatactcgtgtgcaccaaagcgaggtgagcatggcgacggacaccccacggattccagaacaaggcgtggccactctgcctgatgaggcttgggagcgtgcgcgccgtcgtgcggagatcatcagtccgttggcgcagtcggagacggtcgggcacgaagcggccgatatggcggctcaggcgctgggcttgtctcggcgccaggtatacgttctgatccggcgtgcccggcaaggcagcggcctcgtgacggatctggtgcccggccagtccggtggaggtaaaggtaaggggcgcttgccggaaccggtcgagcgcgtcatccacgagctactgcaaaagcggttcctgaccaagcagaagcgcagcctagcggcctttcaccgcgaagtcactcaggtgtgcaaggctcaaaaactgcgagtgccggcgcgcaataccgtggccttacggatcgctagccttgacccgcgcaaggtcatccgccggcgggaaggccaggatgccgctcgtgacctacaaggtgtgggcggcgagcctcctgccgtgaccgcgccgctggagcaggtgcagatagaccatacggtcatcgacctgatcgtggtcgatgaccgcgaccggcaacctattggccgcccgtacctgaccctcgccatcgacgtgttcacccgctgcgtgctcggcatggtcgtcacgctggaagcgccgtctgccgtttcggttggcctgtgcctcgtgcatgtcgcctgcgacaagcgcccttggctggaaggactgaacgtggaaatggattggcagatgagcggcaagcccttgctgctctacctagacaacgcggccgagttcaagagcgaggccctgcgccggggttgcgagcagcatggcatccggctggactatcgcccgctgggacagccgcactatggcggcatcgtggaacggatcatcggcacggcgatgcagatgattcacgacgaactgccgggaacgaccttctccaaccctgaccagcgcggcgactacgattccgaaaacaaggccgccctgacgctgcgcgagctagagcgctggctcacattggcggtcggcacctaccacggttcggtgcacaacggcctgctccaaccgccggccgcgcgctgggccgaggccgtggcgcgtgtcggcgtaccggccgtcgtcacacgcgctacttcgttcctggggcactgttgcaaatagtcggtggtgataaacttatcatccccttttgctgatggagctgcacatgaacccattcaaaggccggcattttcagcgtgacatcattctgtgggccgtacgctggtactgcaaatacggcatcagttaccgtgagctgcaggagatgctggctgaacgcggagtgaatgtcgatcactccacgatttaccgctgggttcagcgttatgcgcctgaaatggaaaaacggctgcgctggtactggcgtaacccttccgatctttgcccgtggcacatggatgaaacctacgtgaaggtcaatggccgctgggcgtatctgtaccgggccgtcgacagccggggccgcactgtcgatttttatctctcctcccgtcgtaacagcaaagctgcataccggtttctgggtaaaatcctcaacaacgtgaagaagtggcagatcccgcgattcatcaacacggataaagcgcccgcctatggtcgcgcgcttgctctgctcaaacgcgaaggccggtgcccgtctgacgttgaacaccgacagattaagtaccggaacaacgtgattgaatgcgatcatggcaaactgaaacggataatcggcgccacgctgggatttaaatccatgaagacggcttacgccaccatcaaaggtattgaggtgatgcgtgcactacgcaaaggccaggcctcagcattttattatggtgatcccctgggcgaaatgcgcctggtaagcagagtttttgaaatgtaaggcctttgaataagacaaaaggctgcctcatcgctaactttgcaacagtgccacgggaacagcctgaacacctgcgcgaatatttccatgaacggctccgcgtacatcgactgaacagtcagcagctgccgcgcgcaaatgcgcccgaatataataaacccggagatgagcagcagaagtgattcttatagtcagtgtgtccagggaggaaattttatgcgtatgtctctgatgtttgcagccgtgacgcttttaaccggtattaacctgttttttattccgtttcagcctgttccggctctgtggggggctatcctggccgttgcttttgttctgattaatgtcgtggcggataagctgcgcctctggagtggcattgcgtggattatcgttgccggcatcatcataacgctgatgctgaaggggaaagagccgggtgacgaattacgcgggttgatcaccgtttttgctttcctggcttcggcctggtactgcgttgtacagtacagaaaagagcagggcgaatctcagtcctgacctgaccggtacccttcatcttgctgctgctcttcctctggctttgcctcactttcctttcacacaatctgctccggggccaccttcggctcctgacccgctggcgcggttcagtcgtcgagccacactccgctaaccgcgaaaagacgcggtaagctccgccgaacccgctacgcggtttcgggcctggcggctagtgtctgatgtctgacgtcaaggtcaacggcagcgcttgctgcgaccgtcccggtcgcgccgctttcaccgtgccggcgaaggactgccggcactctgcggggcaacgccgtttcgcgcccgcgcgttccgtcgttgcggcgggtgcctgctcctttcccctggtacccgtatcacccgtttgagtccattcgccggggctgagacaagcacaacccgtcttgctgtccaggggacggcagggcctttcgcaataaatttttcccggccattccgctgccgcttcattaggccgaaaaaaatttcccgctcacccccggacatctgcaccgggccgtgctcgtttacgcccttgcggcgaacggctctcaaacgggtgaaggttatatccagggggcaggttcagcaggtccccgcacaaagtcaaaaccgcggccccggcaactcaacgggtgatgttctttaaaaatcaggaaaaagaaaaatgcaggatccttcattgcgaacgtatcggatcgcatttctgggaagcaatgccagcggcaatctgccgatgtttacccgggtgcaggccacgaccggaaaacgggcgataaaagcgtttattgaacgctgtgaacccgtcaaaggctggtttctgggcgaaccggaagacattaccgatcagcttaagaaggaggaagaagaagcgggaagcaaaccgcagatatgaaaaaagcagggtaaaccctgcttctcccacgccgtaaaaatcgcacgaacggtttttccggcttcgttaactaccataaggagtcaactctatgatcgtttctattttttcaccttccgcaggcgctgtaaagccccgtcgtcattcgcgcattctgcgcgcagatatcaccgcacctgagattgatcccgctctcagagctttcgggcgtcatatcgccagaagtcaccgcaaagggcgcggtgtccacatccccgcgatgaaaaataccgccctcgggcaggtactccgcacgctggaactgaaacgcgcatttaactgatgaggtgagccgccccgcgaggggcggcaactgcaggaaggagaaaacacaatgacaccgactaccgcacagatcatgacggaaaataccgtcagccagacttaccgggcaacttattcacccgatgataataaattgcgactttacgcatcattacggctcgatgaagaaacgtattccctgatcaacaaagcaggctttcgctgggcgcccaaacaggaactctttgtggcgccagcctggacgccggggcgggaggatgtcctgctttccctcgccggtgatatcgaggacgaggacagcaccttgtttgatcgccaggagcagcgcgccgggcggttcagtgactacagtgaccggcgggcggttgaatcggagcaggcgcttgcgcatgttgattcgctggcatcggctgtcccgctgggacagccgatcctggtaggccaccacagcgagcgccgcgcgcgccggcatgcgcagaaaattgagaacggcatgaaacgtgcggtgatgctgttcgagcgcgccgaatactgggaacagcgcgcgcaggcctctctgcggcacgcgaaatacaaggagcgtccggatgtgcgttaccgccgtatcaaaaaaatcgaggcggaattacgcaagtcccaaaagcacattgcccggtctgaaaagtatatgacgatgtggcgtgcgcagacgctcgatctgaaaatggcgttactggtcagtaattatgatcatattcatgcctgcttcacgctcgacaaatacccccgcccgacagagaaaagccagtatgagggctcgatgtctctccattctgccctgtctgaggagatcattacttttgaacaggcgcgggatattgcgatccgctgtcatgagcgcacgattagccaccaacagcgctgggttaatcattaccagaaccgcctggcctacgaacgcgcgatgcttaatgaaaacggtggcgttgtcacccgaacagaggaatttgaaccaggcgggcaggtactgagccggggagaatggttaaccattctccgggttaaccggagtcagggggaggtgagttcagtcgaaacgccctgttatcgctttctgggctacagcggcacgatgaaactcacgcccgaccgtatcacggactacaaagccccgacagcggaggaagccagcgacgcgaagaaagcggcgaagcgcccaccgatcgtcaactatccgggggaagggttccgggaaatgacaaaggccgagtgggcgaaattacccgctgattataaaggcgtgcggggtgctgcagaaaccgaaacacacggcgcttaccgcttccgccggtgcatgacgcacggctgtacgctcgtgaatgtgtatatcacagacatgaaaaccgttgaaattccgaaaaaatgacaggaaggctccccggcatcttgccggggagatcagggagtacattcatgcatcatgaccttaaacaccgtattcaggcgatgcgggacaaactggaggggcgcgcccctgtcgctgaaattcaggggagctcgcagctttttgtcacccccgccccggaatgtcgccggctggttgagctggctgatgtccgggaaaccgatcgcattctggaacccagcgcaggaacgggcgccatactgcaggcgatcagggatacagtcccccgggcgaagtgtgacgccgtggagctgcacgccggattagtcagccacctgcaggcacgtttcccggaggtccggacctggtgcggggattttctcgaatatcatccggatcgccggtatacccgaatcatcatgaatccgccgtttcatcgcggtgatgatatccggcatatccggcgggcattaactctgcttgagcctggcgggattctgacgggcatatgtctggacggcccgcgtcagcaaaaggcgctggagtccctggcggacgtctgggagccgttgccgcggggaacattcacgtatacccaggtagcgaccgccatcctcagaataaccgtctgatgacacgttaagccggcggggcacctgtccccgtctggccgcgcctcgaaagaccgcgcgcctgcggcgccgggaaaaccgggccgcgctgacgcgccgcccgcatttcctttccgcgtcttccctgtttgctgcctgctgtctgtctgcttcctcttcttctccctgctgtgatgcctctttttaacccttaaaggctttaaaagcacacccacactggacaccttcggctcctggccagctacgctgtccggtcgtcgagccacactccgctaaccgcgaaaagacgcggtaagctccgccgaacccgctacgcggtttcgggcctggcggctagtgtctgatgtctgacgtcaaggtcaacggcagcgcttgctgcgaccgtcccggtcgcgccgctttcaccgtgccggcgataaagctgccggcactctgcggggcaacgccgtttcgcgcccgcgctcttcgtcgttgcggcgggtgcctgctcctttcccctggtacccgtatcacccgtttgagtccattcgccggggctgagacaagcacaacccgtcttgctgtccaggggacggcagggcctttcgcaataaatttttcccggccattccgctgccgcttcattaggccgaaaaaaatttcccgctcacccccggacatctgcaccgggccgtgctcgtttacgcccttgcggcgaacggctctcaaacgggtgaaggttatatccagggggcaggttcagcaggtccccgcacaaagtcaaaaccgcggccccggcaactcaacgggtgatggttttaaaaggcaaaacaacggattaaggagattcatcatggcagcacgtggcgttaacaaagtcattctggttggacatctgggacaggacccggaagtgcgttacatgcccaacgggggcgcagtggtcaatctgacgctggccacgtctgaaacatggcgtgacaagcagacgggagagatgcgcgaaaacaccgagtggcaccgtgttgtcatgttcggcaagctcgcggaagtggcgggtgaatacctgcgtaaaggcgcacaggtctacatcgagggccagctgcgcacccgcaactggcaggacgatgccggagtcacgcgctacgtcaccgaggtgctggtcgggcagaacggcaccctgcagatgctcggcggccgccgtgaatccggagtgcctgagagcgccgcgcagccgcaaaatcctgccaccccggcacaacctgctcaggccgcagctaaatccccgaaagcgaagggcggtaagaaaggccgtcaggatgccgccccgtctcagcaaccgcctcagccactcccggatgatttcccaccaatggatgatgacgcgcccttttaaaccacgatgaagacgccccgttcaggcggggcagaaaaggagaaacacatggaccataacgttttgtccccgcttgtatccctgccggatggcacgtttacccgcgagcaggctcaggttgtcgcagcgcagtatcagaatgtggcgattgaagatgaccaggggacccattttcgccttgtcgtccgtcatcaggatgacggcagcatgatctggcgcgtctggaattttgaaccgggcggcgaggacatgatgaaccgctacatccgggactacggagtacgcaaaacgaagtaagcagtaagaagaaggccggacaggtgggctgtccggcagacattcatcaatagctaagaggtatcaattatgtctgcaacagagtctaaggtaaaaactgcaccgaaaaccagcaaaaaaacgcttaagtctgccgaagctgaggcgcttaaagtggctctcgatgccgcacaggtcgagtatgtcccggtgacggcactggtgaagtctcccctgaacgtcaggaccattccctatccggcggagaaagtctgttcaatggcagattccattgaagccattggcctgttgcagaatctggtcgtgcataacctcccggatggtcgctgtggtgtggctgccggtggtcgtcgcctgaaagcgctgcagctcctgcagagtgaaaaccgtatcgatgccggatatcaggtgatggtgaaaaaggtacctgatgaactggctgttgcggcatcaatggcagaaaacgaacagcagatggcaatgcatccgtctgaacagatcgccgggttccgcacactggcagagcaggggaaaaccgccgcgcagattggcgatttgcttgggttcggtacgcgtcatgttcagcgcatgttgaagctgaccgaactggctcccgaaattctggcggcgctggcgaaggatgaaatcaccaccgaacactgccaggcactggcgctcgaaagcgatcagaaacgccaggtggaagtgctggaatccgcccgcaaacggtcctggaataatgaagcatcagtttcctcgatccgtaacctcattatctcagaagaggtttccacaaacggcgacaaattccgctttgtgggagaggccgcattcagtccggatgaaatccgggttgatctcttcagcagcgaaaacggcggctatgtcaaaagtgcatcgctcgataccgccctgctggaaaaactgcagaacatcgcggagcacctccgcgaagcggaaggctggtcatggtgtgatggtcgtcttgacccgatttcacactacgggaaggacactaaaatctggcgcctgcatgctgtcccgcctgtggaatataccgaagccgaatcagaacgtcttgcagagctggaagctctggaagctaagtatgaagacgagaaccccggcgtgaatgatgacgtcgtggccggggctctggaagccgtctgggaagaacagcagaccatcgcgcaccgggcaaaacaccgggcatggacggatgaaatgaagcaatctgccggagtggtggtttcctggactggccaggaggtgaaagtacagcgcggtgtggtgctgtgcgccgatgaaaaaatggaggagaaggatgcatccaccgatcaggcccctgaaaaagtcgatccgctggacgccgtcagtgtcccgttgctgacccgcctttcttctgaacgcacactggcggttcaggcggccctgttgcagcagccgcagaaagccgtcgcgctgatggtctggaaaatgtgtaactcggttttccataccacaacgtccgtcaaagagccgttctgcattagcgtgagtgtgtcgcattacgcgctgacccgtgaagcacctgacggtgaaaacagcgttgcgtttcaggccatccagtcagaaaaagaacgtcttgaagccctgctgccggaaaactggcgaaaggatatgaccaccttctttacgctcgatggcgcaaccctgatggcactgatggctttctgcaccgcctgctccatagatggtgtacagggcaaggatgaatctggtcgtaaacaccagagttcgctggatggggtggaaaacgccattcagtttgaccttcgtgactggtggaaaccgacggctgataaccttttctcgcacatgaagctgccacacattgtacaggcactctctcaggccggactggctggcgcagcacaggacgccgcgaagatgaagaaaaaggatgccgctgaacatgcagagcacttcctctcaaaaatccgttgggttccggaatggatgaccagtgctgacaatcagaaacagcctgccgcaaagtctgaactcagtctggcaacaagtcagaacgataccgacgctgatgccggcgacgtcaccgaccataacaacccggcctgcgccgcctgataacggagacgccgccctgcggggcggcgataaggagactgaaaatgaaaacgttactgactctggatgtcctgaaaaccatgtcttctgatgagctggaagactaccgcgccgccggtgaagactttcgccgggagctgagtcacgctgtcatgcgcgatctgacctcaccgtccggctggtccgtgaatgccgaataccggtgcgaatttggcggcttctttcctgtccagatccgttttaccccctctcatggtcactttgatgtggcggtatgcagtccgggggagttgaatcctcgctggatagtggtctttgttacccgtgacggtcagccgttctctgtcgttcgcgtgatggatgcattcaaccctgaactcatcacccatactctggatctcatcgagtgtcttgacgccggtggctactcgtttgccagcatcatcagcacgctgtcacaggagggcgcacaatgatcccgtcatccagtgctcttgtatccctgaaaccagcccgtcaggcagcgctgcaggccatcatgacggtggaagaggctcgccagcgcggcgcacgtctgccatcgatgccacacgtccggacattcctgcgcctgctgacaggctgtagccggattaacagtgacgttgcccgccgtattccgggccttcaccgtgatccaaaagaccgcctttccagcctgaaacaggtggaagaggcgctggatatgcttatctccagccacggggaatactgtccgctgccgctgacaatggatgtgcaggctgaactttttccggaagtccttcatacccgaacagtacgcaggctaaaacgtcaggactttgccttcacccgaaaaatgcgccgtgaagcccgtcaggtcgagcagtcctggttactgcgtcagaacctgctgggacaggctgtcacagaactgaattttcagtcaccggaaaccgtctgcacctggtacacccggtggagcgacgagtttgacgcggcagagcttgcagcaccgttctggcgctggcagtcgcgattcacatcgctgaaggaactggactggcttcgcatcagcggtgagccgctgtatgcagtgatgtacgaaattccgttaattgtccgggaaacacctgagcatattcgtgttgctgaacgctggcaggtgccaaataagctggctgatcggagtggtgtatgaagtggcgctattctctgcgctggaaactgccgcacaggccctgcccgggtccacgggaactgatttccgttgtcgtggaggctgggcaggcggcacctgaagaggtgatgtcacgctgggtggctggctcaggttacgctgtatgcgtggattttcacggccagaaacagatccaacgctggagcgatgaacggaaagctgcggtgagaaggcgcaacatgcaggctcgtattcatcgtgttgcccctttgtttgccgacgagttaatcgagcgtgaactggctgcgcgtccggagtatttcaatggcaagtccgcccgatgaataagtacaatgctgtctgacaactcagatggccaaatacaaggaaagcagaactatgaggtactggttgctcgttatcttaatgaacgtgctgttctggttgatcgtgaagcatgttgctccggaatggtatggttccccttgttattatgcaggccagattatctgcacactaatagctgcggtcatcacatggcgtgatccgcctgactggttagatggaatcctgctcggcgttatagaattcggcgttctgattgccgggattatattctttgtctggggcatcgggtacaagctggcattctgggggcaacatgatcctaataccatatatgcaagtgcaaacgatgtgattttgcctaatcttgcgctgggcacgggcgtcttgattgcgggatgggtatacattagatatttaaagcgctaagcagcataaagcgtggatatacctggtaagaaatagcaccgtcccggtataatcgacgtggcgcttgaggctttttgcctcatgacgtgaaggtggtttgttaccgtgttgtgtggcaaaaagcagaaagccccgtagttaattttcattaacccacgaggccacctgtatgcctagacaacatcaggatagcctcttagatgccgcaaggcaaggagaagaaggccatgaaactgccgcgaaacactctgctcgggtgcgtattaatagtgtgcctcacactgctgatattcacttacctcacccggaaatcactttgtgaaatccggtacagggacacgaacagggaggtggcggcttttctggcttacgaatccgctaagtagctaaccccggcggggggaagcccccgccattcaggggagatgatgtctgacaagcctgaagcgcctttatgaaggggttaccgttcaccggtagcccctttttcctgcttacaggaaaaaaagcccgcacgacaggcgggcaaaaatctttcatctacctacaacacagattcaatgaatcgcaagtcacattaacatccttcattcaccgtaacaccctgtcatcagtctgaaaaaaaagtgattgattgtgaacatttgggttctggtgataagttctctctgtagcgtagccctctttacggaggggtggaaacagcaacggcagagttaaaagaccacgagtcagtgaggctgtccaaaggctccccggggaaacccggcgctacatcaggttgcatagcacttaacccgcccgcctgccgggttttccttccggaaaagtgctgctataacttattcgtgcaatgcgcggtatccgctttcctggtaaatcagtcgcccggtctgccaggtgatactgcagttcattccttatatgatacagtgatgttcgcctgctttttaagcaggctttttttgttgattatgtatgacatctgtcatacagttgattgcgtaatgaacagaaattgttccacttaactcagtgaggcgaagcgcagtcgcgggtgagccaaaggagagccagcatgaacttcacgataaaatcccgtaaaaccggcgaaattttcagtttttacgcacccgacagtggtggttatgttcacctggagtccccggggcaccctggtaacaccggcgcccagatttgccgtggtggagggtttatggggagtacgctttcctgtggcgcttctgaggacgatctggccagtgttgcccgtaaatggtaccgacagttcgtgagggagcggcgcaaattcttaattatgtcgggccagtattctgaggataaccagtgaaaaaagagatctcccgcaacccctctttcacaccttcgcctaagctgcgagcacatctgaactcccacagggaaggggtgactgaacggctgaataatatctttgatcgctatgcgcatctggttcgcgcctgtgcccttcctctcgatgacgacgaaacacaggttctgcttaatgttctgaatggctccgttgtggaacccgcctttattgaatatctggctcaggaaattcgggactcggatgattatctggaagggatacccgcagctaaatcactgtacgaaaagtgtcagtcagcgacctatccgcaattgctggccaccgtcgaacggctcgatcgctgaagaaggtaaatccgatgagtgacgtactttcctgcagacaacttacggctaatcttaagatgattgccggggcgattggctgcctcaacaggaacgatgttgcacaaattatcagcctgggcggtgttccatgttcaaaaagccgggccgactcgataatccgcagtgccggggcggaaaaaaatgcatccggtaattctcatcttcgcggagccagaataaaacgatccgcagatgtcacaccggaagaattcaatgcgttttgtgcagggctgaaaacatttcttgtctcgtttgaaacgaataatgtgagtgaaaacaatgataagtaagctcctgacctgtctgtgctccggacaaatgcagtttcaggaattaataaatccctatatatggcagcgttaattttgtgacgcggattattacatccagcccgcttattgagctgtagatattgatttatgttgattgttctcgattcgtccattggatcagcccgttatttctctgcgggcttttgttcttatattcctccgttccttcctgtgatggctttatttcctgctgtgtccctttttaaaactgaaaaggattaaaagcacacccacactggacaccttcggctcctggccagctgcgctgtccagtcgtcgagccacactccgccagggcagctgcttcgcacccgccgggctccgccgaacccgcaagcggtttcgggcctgacggctagtgtctgatgtctgaggtcagggtcaacggcagcgcttgctgcgaccgttccggccgcgccgctttcaccgtgccggcgataaagctgccggcactctgcagggcaacgccgtttcgcgcccgcgctcttcgtcgttgcggcggatgcctgctcctttcccctggcgccgtatcacccgtttgagtccattcgccggggctgagacaagcacagtcgccatcatccgtccagggtaaatggcacgcggtaaaccgcgccctggacagctgctgtcgcccgtgctcgtttacgccctcgcggcgaacggctctcaaacgggtgaaggttttatccagggggcaggttcagcaggtccccgcacaaagtcaaaaccgcggccccggcaactcaacgggtgatggttttaaaaggcagaaaaacagacaaaggagaaagctggatgagcacacaaaacgtcaacgtaaaaccctccaccaaagaaagcacaaccctccggactgacggttttgtgcgcaacattcattcccgaaacccgttcgatgttatccgcgccgatgtagtgctggaacgtatcgagaaagaggctggttggtgctgcgggatgcattacgagctgtatcaggcccatctgctgggtggtgcgctggattatctggatgcgctgccgttgaaagaccgtccggtgttaatgggcgctgcggcaaagcgcggctatctgctgacgctagccgaagaggaacgcgcgctggaagcacgggatgtactgatgagtgaactggcggcaaacgactgctgagaaataaacacggatggcggcgtatcgctgccatcccttaaagaccagaggtaacgcaaaatgaaagtatacggccatcaacactcatcagaggttttctcccgggaaacttccccatcctgttttgaaccaaaagcggaaaagttgatcgcttttcatggaaaggatgccagttacgcctataacgtgctggccgatctgaaagccgcaggtgcttcatatacgcgccggaatatcatcgccgatatgttccgccgtctgggtgtggaatgaggtctgggcaatggaacacgtgaaaagacaaatccagcagggggcagggaacgcctattatgcggggatgcagtggcgcggtattacactcggacacgccgatgctgcagcgcttaatcagtttgatatcgatatcagcaaagctcaggcacccgaagcacgcacctggttgcttcagaacaaagcggaattcatagctcttatgctgggtattgagattgtaaagatcgggtagtgagaagttagctaacttagctcttgagctaagttagcttttaagctaacgtatacacatacggaccagagattacattcatgttcacagtcatctttcatgatgaggctgaaaaagagtttacggctctgcctgctgccattcgtgcaaaaatggccaggctactcatgaagctggaagcaaaccctcgccagctacgcgagccagataccaagccgcttggaaacggccttttcgaaatacgtacaatgggggcagatatcgcccgcggaatctgggtatatcagagtggtgaacgtatttttctacttcggatctttatcaaaaaatcgccaaaaacgcccccggcagaaatagatctggcacttcgcagactggaggaaatgcagaatgaaatataaaacccttagccaggttcataccgaagcaatgaacgatcatgagtacagcgcggcattcgaggcagaagaagcctcggagctacttcgggaaaccttagcaacatggagaaaagaagcgggtttgacgtcggcacaggttgcagaacgtatgggcatcaaagcgcctactatctcacgtatggagaagaacgcttcgcgaatgagtattcagacgctggttcggtacgccagagcctgcggtgttaactttaaaattcagcaggtttgaatgtcactcgtcagccggatcctcagtggtgaacgcagtctgaccctcgatcacatgcgggcgctggcaaatcgatttcaaatcccggtctcgatgtttgttgactgattcgggaacagagcaggcgaagggggcatctgtccccgtctggccgcgcctcgaaaggccgcgcgcctgcggcgccgggaaaaccgggccgcgctgacgcgccgcccgcatttcctttccgcgtcttccctgtttgctgcctgctgtctgtctgcttcctcttcttctccctgctgtgatgcctctttttaacccttaaaggctttaaaagcacacccatactggacaccttcggctcctggccagctacgctgtccagtcgtcgagccacactccgctaaccgcgaaaagacgcggtaagctccgccgaacccgcaagcggtttcgggcctgacggctagtgtctgatgtctgaagtcaaggtcaacggcagcgcttgctgcgaccgtcccggtcgcgccgctttcaccgtgccggcgaaggactgccggcactctgcagggcaacgccgtttcgcgcccgcgctcttcgtcgttgcggcgggtgcctgctcctttcccctggtacccgtatcacccgtttgagggcactgttgcaaagttagcgatgaggcagccttttgtcttattcaaaggccttacatttcaaaaactctgcttaccaggcgcatttcgcccaggggatcaccataataaaatgctgaggcctggcctttgcgtagtgcacgcatcacctcaatacctttgatggtggcgtaagccgtcttcatggatttaaatcccagcgtggcgccgattatccgtttcagtttgccatgatcgcattcaatcacgttgttccggtacttaatctgtcggtgttcaacgtcagacgggcaccggccttcgcgtttgagcagagcaagcgcgcgaccataggcgggcgctttatccgtgttgatgaatcgcgggatctgccacttcttcacgttgttgaggattttacccagaaaccggtatgcagctttgctgttacgacgggaggagagataaaaatcgacagtgcggccccggctgtcgacggcccggtacagatacgcccagcggccattgaccttcacgtaggtttcatccatgtgccacgggcaaagatcggaagggttacgccagtaccagcgcagccgtttttccatttcaggcgcataacgctgaacccagcggtaaatcgtggagtgatcgacattcactccgcgttcagccagcatctcctgcagctcacggtaactgatgccgtatttgcagtaccagcgtacggcccacagaatgatgtcacgctgaaaatgccggcctttgaatgggttcatgtgcagctccatcagcaaaaggggatgataagtttatcaccaccgactatttgcaacagtgccgttcccgttcaacaagttccggcacgacgggcttgttcatgcgctcctgccaggcaacagcagcagccaccttatcgacggcaactttatcctgctcctcctttgaaaaagaggcgatattccactttgacatatgctttaccggtctgctttacaggaagatatccctgataatacgcgaattccggggcaacagcgactgacaacggagaggagagtgcgcggcgccggaggcgcggcgacgtctctctccggcaggcgcagcctgcccgggttttcgcgcggccggaagcggcagaggttcccccctgccctgtgatttatcgtgcctttccccctgaagaatgaaatggccgccaatatagacggcgcactgacaggtcatgtattcgcagatttcatccatcacctgcgcagtggtcagttcccgctgaccggcatcgcggcggcgggcattaatcagggctttgtactgtcgcaggatatcgcggctttgtggtgcaagtttcatgtgctttctccttaaccggcgggcttccccgccggatagtcatcagttgctgaatacatagccttcatggaagacatagccgctgctgaacagatcccgcgcgtaagcctcataatcgaaatagacgcgcagggattcaggcacctcgtttaacaggccgtgatcctccacaaagccataagcaaaatcctcctcgctttcagcctcgccacaatacgcctcatcaaaggcgtcatagtcgcactcgccggtatagtccgcccaggccacaaacgcggcagcgcgtccttcgtcctgcgcctgccggaatgcctcgataaacgcccacttaacagaggattcagaggcaaactgagacgggatcccttcccagtcctgaaacataaactcggggtcatcctcggcggcatgcaacgcccggcaggcgtcataaaattcgtcttcgtcgtcgaagtcggttaaatcaaaccatttgccaaaaatactgccgccgttgtactggtgatatgtgcccacgtagacggccggaacggttactgatgaagtcatttttgtctccctgcggggcggtgtaaccgccccggtcgttaatcagtccagcgcggcgtaaatagcactgcattcggggtgaaaggtgatgtgattccagagctgggcatcacgcagcatataaaggcgagtcagcgccgggttactgctgtcatgatgggccgccagacggcgattaatcgccaggctggtcagaataatgcccgccgcgtcggcgctgacagtgcgatcaaaccagttttcgctactgaccagatgtacccggccacaatccggcatcatgtagccgcccccctccggcaggcgaataaaatgccagaagccgccctcatattcgggcatccattttttggccagagcgtacacctgtaattccgcgagcatgaaatccgtgccgaacaggtacggcataaaagacaggcggtcggactcctcaacattcaggaccgggcatgtattcacatactgcatggataaacctccgtaatcacatagactgcggcaccgggttgtgccgtgccgacacgacagcccggcgaaaagcggaagatgcaggggcgacaccggaggccgcagcgcagatatagcgcgaagctggtctggacggttttcgagcgaaacctgagcgagaaaacgacgggaagaacggcgagcatcataaaaaacctgcgaccgggcgaggatggcggcgtcagcgcacccttgcatctgcagcggccgggctaaagtgaaggcacggcactacccgtcgcgatgcaggaggttgaatacagggtttctctcccccgtttttcgaccaccgggagaaaagcggaagcagatgtcgcaacgcgacagacgcagtaataaggccacggaccggagggatggggccgggtgaagcggagccggcggcaacggcaagccggcgactgccttatccggggatggcggcgccagcgaactccagcctctgcggctgccgggctaaagtgaaggcacggcacagccagcacacggcacggcgataacagagggttgtgttcacccaaaaggcccggaaaccgggccgggtggacgcggagccggcacggcgacatccttatcgcaccacacctcctgtgccggcaggctgacaagggagggtccccctcccctgacgctccgggctgtcactcctgagttctgctggcgcgggcctctctcaccatttcccttaaaacccggcgatcaaaccagcgccggaccggagtgtccgtaaaacgcagctgatcagcgataacccctgcgctcctgatagtttcctcccgctcgttaaccagggtgagcaggaccgggcagaatcgcgcatcgcgaatcagaatggcatcgaggacctgatccagcctgtcggtttcgtcttcgtccaggcagttatcatgatcatactccacggccagcaagcgccagtcaccgatccgcctgtccatcagacggggattgacggacggcgtaagcgcggcggcgatgcgcttcgtatcccggtggacgatttccgatatctgcgtgagggaggctttcaggaaggccagcagatcgtcacattccgccgctgtcagccactcctgagcgtaaggcaggcggataacctgacagtcagccagccgctccggatgcggatatgcctgcaccggaaagagatgcagacgagccggggttcccgccagccgccgggcgctggcgagcaacaacgctgcccggccatacgtcagcggctgacaaagctgttccgtaagcgtgaggatttccacgccactgagagagccgcaggcggcaagccagccgggtacggtttcgggggcgacgggcgccatatcaacagtgtcgggccagccagcctggcgcagcatccggtcgccgtgacgcagaataagcgtgttaagggtttcttttttcatcattatcgtctctgtccgggttatatcaccccgccgcgtggcggggcgatctgctgtcagcttttcagtaatgcccgcacttttgctgtatccgccaggcggcgcattacgctttccggcaccgggagattgcgatcccgtgcggtccattccctgtcccacaatgcctgttcggcggtaatcagcagggtttcaagcaggtcaaccggcacagtcaccctctgcccgttctctttcacctggtctatcagtgccatcaccaggccggctgacacgcccgactcaagccgttgttcttccggtatagtgtccatgcgttccagtactgcccttacgtcatgttctgaaaaggaatattccatcccgtcagccagtgcttcaatatccgccggggtccagataatcaggttcagcggggtttctgcgggatattgctcattcagcatcctgcaaagatcttcacgggttccgtacatgttctctcctcaatccagaaagctttcatcgagcatcagtgcaatattgaacgcctcatccatcaggacgctgagacgtcgcagactgataccggcaagccgttccgccagtccgtcgtaccggtagtggtacgtgtcttccagcactttcagggtggttttcaggtcgcaaagattgttcgccagcccggccatatcgcggcgcagggcttcgtgtccgtcgtaattcattacgcggcctccggaagccattcatcgttcgccgccggggtatttacggcccggtgcatggcggccagtcgttcggttccggcccggtggtactgcgccagcatttcgatgccgatatagcggcgtccggcacggtatgcagcgacgcaggtcgaaccgcttccggcaaacgggtcgagaacaatcgcgcccggagcgctgaatgactcaatcagcggctgtagcgcctccactggtttctgcgtcggatgcagggtattaccggtatacgggaagggcagcacatccggcagcggtttaaggggcggcacggggcggcctttggcaaggacataagccccttcatggcagtagtccacaaatccgcgtcgggccctggcgttacgacggttggaggcatagtttttggtgaacacaagctggcccacggcatagaatcctgccgccttccacgcggccataaagcggtccacacggttccagccgtagaagctcaccatcagcgcgtcttttttaaggacgcggtacatctccagcgtggccggttgcagccattcgtccgtcacatccccggcaatctgtctgccctgacggtccttaaaaccgacgaggtaaggcggatcggtcacaataaggtccacggcacggtcggggaatccgcgcatcacatcaatacagttcccgagaatgaatctggacatggcagcactcctgtagtctgagggggcaggaggcatcaccgcgataccgttccctgccgcacgctgcctgttcatcgcgtccggtcacgggtcaggccgaccgtggaataccgcagccgtccgtcttttggacggcaaggatatgccgcgaaagcggcttgaagggcgttccttaaaagggcgagggactggcgtacactctcaacgacgccgggccggagcggaaaaaccgcccgtcccgtaccagaccggacgcgagacactggcagcgggcggcaggctggcgttaactccaggcgaacggggaattaccggcatacctgtccacaaatccggggcttaaaattgtggataacctgaaggcaaacgacggagaagcgcgggagaacagacgccaccacgtctgttctttttttgaacaaccggaaagtttgtatcagcggttcagggatttatccccggccagggacaggccaatatagacgcccgccccccagatgacctgcgacaaaatgaaaacccactgcggaacgtcgaaaaccagaagcggaagcagacataccgtcacaatgccaatcagccggctgccaaattttcttcgcaccggttcactgctgtcgacgggaatgcgggcgagacggagaacatttctgaatcctggtgacatgagaaccgccctgggatgccagtcatttgaaatcggtgtagtagtggatgtgattcgtactgttagtcgccgaatgcacgccgcatatttttctttatttcccgggtatccgacccggacaccggcgcggcagatgctgccggcgtatccggtactgcagctgcagccctgttcacgtcagcggtgccggccatctgctgaaccagtgcctgcagctcactgaccgaggtgggcggtaccggcatactggccagcaggcgcggcagttcaggcgccgtcgtgtggagggcaagaccggtgataatcaggtttctcagcagatccccacgcagacgggatgacgcttccgtcagcacactttccacccgttccccactccggccattctgaagcgtcagggtgtaacgccggcgctggtattccgtctccggtgacacgggcagagcagccccaccattttcgggctcatccggaaggccggtgagtgaggaccaggttccggagaccagggccatcacggcgcaaaggcggacagcgcttagctgcccggcaaagaacaccgggatcagcgccggtaaacgggcatccacctggtataccaccgccccggcggtggcggcggtacggatgaactcaccgcgcaggggctgtgagatggtgctgatggttgccatcgccgcgatgtcggtgcgatcgtcgctgtgcagatagaaagaatactggccgtccggcacgtttagtcctctttattgtaaagggcaatctccctggccagcgccatctgcggatcgcctataacctcgatacggtcatgagccagaggccaggcctgacggatagcttcttctatgagggaagcccctcccccgaccaggaatacccggttaacgttcctgaaggccgtcagctcactggtgacacgcgcccccagggaagtgattgcctctgttattttgttccgaacctcgtcaattttaccggcatcgttgatcacacgctgcagatactgacgatcattgcggttgcggatgacagtgtcagcgatgagggcgctggtttcgctgtctgccgcacgcagcgcgcctgcagctgcgcgggtgacctgtgacacaccgacagacggattaccgtgcaccgcactgatatcatcaaactggccgacaatcacaccggcatcgagcgtggtaccaccgagatcgataatcagggtggtctcagcggggccgggtttcagctccgcgagacgggagaacgccgccggtagtgattccggcatcaccttcacgtccgttacggtaaatgccctgcccttattcagaaccagctcacgcatcaggttttcccgtttgcgtcgtatgttctcctcgttccgctggcagtccccgtcgtaatactcactcaggggcagcgtcacggtcaggctcaccggctgcggctccagtccgctgttcagcagcgcatgatgcacggccagcaggttgagatcaccgtactgatattccacgtttgttgtcgggatggcatcccgactgacgctgtcccaggtgtatttcagcgtccccacctgatagttgaacgttgccgcactgaattccgccactttccagccatgccggaaggagttcgcagaaacccgggtctgaagctcatcgccttcaaaccatgccagcttaacattagttgaaccatcatcgcagtaaatattcatcaatatgctccgttagttacactcaatttgataccaattataagagcaaaatgaaaaaaacaaagtaatatttctcaatatgagcaatataaaaatatcaaaatgattaatataagcattttgaacacctttatttactcaaaatgttcttaaggcatgcgatctggattatcgtcacgctgttaaatatgtcgcggtagggatacccgttaccggataccccccgcacagatcccggcgtgcgcgatttacgcaccgggctcctgcctcgggtgtctggcggtgaaccgctccacaggccatggatgaagaacccgaacccttggtagccatgcggctgccagtttgtttgctttcgtccaggtcgtatcatccttctggctcctgcgcctgagcgcccggcgccagaggtttgttacgtgtgtcctgaacttctgcatggtggggaagttgcccggtaccgagtgatagttcaggtatccctgaaccactctcctgagccattttccctgttcggggattgagtaatgccagcgccttcgcagaccgtctttgatggctttcagagttgccgtcatccgatcccggcgggtctttcgtatcagcatgaacctgccgttgcgatctttcccgctgatgtgcgtgaacccgaggaagttgaacgtttctggtttgccttttcccctgatggcacggttttcggcagcgaagcggccgaactccatcagacgggttttctccgggtgaaccgtgagtccgaactccctcagtctgcgctgcatggctatacggaagcgccgggcatcgtatcgtttgtcgaacccgatgacgatgtcatcggcgtatctgaccattaccacattgcctgtggcatagcgacgtcgccactgatgcgcccacagatcgaagacgtagtggaggtatatgtttgccagcagcggtgagatgaccgcaccctgtggggtgccttcctccgttgctcgccattgaccctcctccgacgtcccggctgtgagccacttacgtatgagcctgattaccctccggtcgccgatccgatgctctgtgaacctgatcagccattcgtggctcaccctgtcgaagaactgactgatgtcggcatccagtacccagtttacgttagtgcgtaccagccctgtggccagtgcgtccagtgcatcgtgctggcttcgcccgggtctgaacccgtatgagaaccccataaagtcgttttcatagactgcgttcaggattttcaccagcgcatactggacgatcttgtcctccagcgaggcgatgccgagcgggcgttgttttccatccgcttttgggatgtagtgacgcctgccgggctgcgccctgtagctgccctgatgtagcctccggtgcagatctgttatgttgttcttcatgtttccggcgtagtccatccacctgatgccatccactccggcggccgctttcctgctcagggagaggaatgcggcttccagtgcttcgactgtcagcaggtggaacaatgctgtaaaccgttctttcttccgctgcttcgcagcttcccgcacgcgtgacagcctctgtgacatgctttcccggctctgtgtccggcgcatgtgtggctgttccgcgttccccttggccccgctccttcgctccactgactccgctcctttcgggttgttcgcctgcttcgccgctactatgagcgagtccgacttctcctctccgtacatcaccggctatgactcctcgtcttcccggtgcgggccatctccgacactggcagatggtcagaggggagatctcccggttcccgcgtagagatcgtattgacatgccagggtctcagaccccgccgggtccatgtggcactcgcagtatcgcaccctatgatgttgccttccgttaacagtacaacgtcggcacccggtaatttaatatacatttcgtggctcaatggctggcctgtcaacacccctgtcaacgcttcgccccatacctcgcggtatgcaacgcatgactcggggaccttgtggattgctggtccttcaatggtcggggactttcaccccttgatctctaccggtctcccggcgcacactgtatgcataaccagtaaaaattagagtgtcaggaggaaagatgaaactacaacttttcagcaccgggaaagaactcccgccacaggcccatccattgtttgccgatctggccagctgcggttttcccagccctgctgctgactatgtcgagtccgatctggatctccatgattactgcatacggcatccgagcgcgacgtactacctgcgtgccagcggagacagcatggccgacggcagtctgtacaatggcgatctgctggttgtggacagtgctgaaaagccgcggcacggcgatatcgttgtcgccagcgtacagggggagtttacggtgaaacggcttctgctgacgccgcgactgacgctgcagcccatgaatgcctcctggtcgccgatttatcctgatcccgacgagctggatatctttggcgttgtcacgcatatcatccaccgcccgagggagatgtactgatgtttgccctggccgatgtgaacagcttctatgccagctgtgaacgtgttttccgcccggatttgaaaggaaagccgatagtcgtcctgagcaacaacgacgggaacgtaatcgctcgcagtgccgaggcgaagccctggatcaaaatgggaactccgtggtttcagataaaaaacgaaaggtacccggaaaaaatatatgcgttttcaagtaattatgaactttacgcctcgatgtcggcgcgcgtgatgaactgcctggaggaactggcccccagggtggaacagtattccattgatgagatgttcctcgacctgaccggcgtggagcactgtatggggcttgaggacttcggccggcagctgcgtcagcacgtgtatgactgtacccgcctgaccattggcgtgggcgccggaccaacgaaaaccctcgcaaaatcagcccagtgggcctcaaaagagtggaaacagtttcgtggcgtactcgcgctgaccaggggaaatccgcaaaggacgcggaaactgctttcactgcagccggttgaagaaatctggggggtgggtaaccgtattgcacgcaagctaaatgtgctgggcataaaaaccgcgctcgatctggctctgacgaacccggccttcatccgcaaaaatttttctgtggtccttgagcgaacggtacgggaactgaacggggaaagctgcctttcgcttgaggaagcccctccgacgaaacagcaaattgtctgcagccgcagttttggcgtgaagatcacggagtacgagtcactccgtcaggctatctgtcagcacgcagagcgggcctctgaaaaactgcgtaaagagcaccagtattgccggcatatttccgttttcatcaaaacgtctccgttcgccattaaagagccttactacggcaacgtggctacggaaaaactgcttacacccactcaggacaccagggacatcattgcagccgccacaatggctctggagcgtatctggagggatgggcaccggtatgccaaagccggagttatgctgaatgacttcaccggctccggcgtttcgcagctgcagctgtttgacgaacgcccgccacgccctcacagtgctgagctgatgagggttctggacgggatcaacaactcagggctgggtaaagtatggtttgcggggcggggtatggcctcggaatggcagatgaaacgggagatgctttctcctgcttatacgacacgatggtcagatattcctgcagcgaaactggcgtgaaactatggcgatttcaccttgaaattctcagcctaaactgcctaattacaataagttagatgtgaaatcgccatggcgaaattattgactcaaatttctgtcaaggacctcgttgatagccttgtccagttcatcctgaatcacttttgacatacggctaaactcataagtcagcgtgcgccctttcacacgcttacgcgcgaacttgtccttttcttcaaaagaccagagtggggaaaccactgacttttccttgggagatggatcgattaatgcctgagatgcctgagaaatcagcttcagaatactggctttctgttcgtcttctggtcgctcgccatcattcaaaattgcatcgagctgagctgatacagcctgaatgagttcttcaggagttaatcccttttcactaagtttttcattaacttctaaaagaagtttatagtcactaaacgatagctccgactgaaccgggaacagagaaattaagtcttgcggtacggccgccgcctgcagcgccctggtaactttagcctgagataacccctccagttcagcaatttccttttgattaaatccggactctttaagagcgatcaatctcagcccaatctcccgaagattatgttctttagctgtctggatatctttagccagttggcgagcttcatcagctgataaatgttcttcggtaaccattacatcaaggcctgtacggacaaaaattgctgaggctcgccgtcttgaaccatccagtatctcaatcctttcactttgcttaataccaatacagggaaagaactgctgaaacttaatcgtctggataatggatttcagggactccctggtcagtgcaagttgatctcttccgttgttttcctggttaacgaatgtcttactttcaacttcagatgcaggcacccgaacaaacctgaacgttaccttcctgccggtttttaaggtaaatacctggcttctaccggtgtccgtcatttccgctattgacgcctgggtatttaactgtctgccgatggtttttcttttctcattcgacatcacatacctccgttagtacgaatgaactcgatgcgatcaaagactgccttcgcaaagtcttccgctgctgattttgcgctttttagtgcctctgtacttccatcataggttgctggatttgctgaaataactgtgtcaaaagtctccccacagcgttcgaaaccatccagtctcggcagaaccatgtctagcatatcggcaccgaaaacctctttggcctgactatggcaaattttgtgatcagacttgttcaggatcttggacatgaagccgacattaccgatgagattgcaggtgtgcccatccatttcaatggaatctatgagggcagggaggctggccacaaactttagggaagaatgaaaatcaaccgtcgccggtggaagaggggtcaacatcaggtctgccgctccaatgcagtttttcaggaacgcatcaaggtgaggaccactatcaaggaaaataaagtcgtagtcatgctggagcttgtcgataatgttctctttaagcaccgcatgaatatttttccctggcagatgttcttcacacaatcccttccagccttcagcaaggaatgcatcgtcaatggaagcggggattacatcaacaccagggataatagacggtactataaaatcggaaagtaattcttctcgagacacgttctggagcatggcctgagcagccgtattttcaaccaagcccactgaattctcatggctcaggaacattgtcagagatgcctgcggatcgaaatcgatggccagaatacgcaggtcttcgaacagaagctgaggatgagctcgaaaagcatgtgataatgaagcggtagaaactgtcttggaaccaccacctttaagattacatacaaaaatcgtaaaggctttatcgaagcgatccctgtacttcggtactttacgatggttatacagatcgatgacattctgaatcgtcatcgcgtatttcatcgtattaccagaaggtttctttttaaaaatgtagccaccggcttccatttcggccacagcatactcaacactgcctttactgagcttaggcagcttatacagagcggctttgctgtattcctgatagaactcggtaagcttcaattcctctttttgctggcggatactttcgctcaaagatgtcagaagcttacctgcacgtgtagcgactttccgtaactgctcaatattgtccatttatcacctcatgacgttttttgtcattttgaacaaaaagagtcatgttgcaagcaaaaattcatattgttttgatttcgctctcaacaggagaggggggaagctcgacgggcgtgctactaaatcacactgcagcaacacgcagacgcacttttgaccatcaacaacaactcatacaaaagggctttgagaaaggtatccaacttgcaagacaggagggtcattcagaaggattctgattttagttacgaccagtgcaatgctgagccttatgtatcagcgctcgccgcagccatgtaaccgagcgtagcgagcgaactggcgaggaagcgaagaggaaccgttccggcagatagctcttacgctcagcacaagaagagttttccatcctctgtgggaaacaggtcaactttatggacgctccggactatgggaaacaggtcaacttcgcggacggtccggactatgggaaacaggtcaacttcacgggcggccgggagtgtggggaacaggtcaacttcgcggacggcccggactatgggaaacaggtcaacttcgcgggcggccgggactgtgggaaacaggtcaactttacggacggcccggactatggcaaacaggtcaactccgcggacggcgcggactgtgggaaacaggtcaactccgcggacggcccggactatggggaacaggtcaactttgcagacggccgggactatgggaaacgggtcaactttgcagacggcccggactatgggaacaggtcaactccgcggacggcccggactatgggaaacaggtcaactccgcggacggtccggactatgggaaacaggtcaactccgcggacggcccggactatgggaaacaggtcaactccgcggacggcccggactatgggaaaaaggtcaactttgcagacggcccggactatgggaaacaggccaactttgcagacggccgggactgtgggaaacaggtcaactacgcagacagccgggattgtgggaaacaggtcaagttaggcaagcactatgggaaatacagcaagtttagttccccccatatgtcagcaacaaactaaggggggagggaaaataaattacagactattgttttttatcaagaaaattaaacagcaagcgaccatcttcttcagtggtatatgttacctttaatggcgtcttctcattaattttcttcagagcaggttccaggaaggtacgcttcatttcagcaatattgtttttctgcgaggcagggagcataaacctttcacataaccagtcatgtgtggtgatccagacaccagtgctccggaactgacacaggctttcataaagccggatgacacgaacactattaagctggccacagtcatagagagaataggtagtgaactgggaggttaagccgacaaggaatggcatgaccttgtagttaaattcaatctgccaggaaccccggcctcgcttcattcctgcttcagccagccacggacgcttaacttcttcaaactcaccttcttttggataaaaggtaaccgttgattcgcccagagcatttaccccagccttcacatcacgactggcgacagacgtagcgacattgaagtatttgacgtaatcggaaacgctgattttgaagagcggcaatacgtcagagtcatcttcctggctgtcgttaaaataggcctgcatgaggcataaccacagcacacgttttgcctgaagaggcaggtaatatgctgcttcagtcaattcgttagattgctttatactggcgcgttttttaaacgttttagtagctggcaagagtgcttgagtatccatttcaatgcctatgggtaaatttttacccacccataatgacagtgaaaacagaaattgcaagctatcgcgatacttatccaccggaaaaatctgcactttatccacaagtggataattgagaactgaacttgacctctttcccatagcttgttgatgcgtatcccatagcttgttgacacaaaacccactgatacgtgattaatttcccatattatgtttaccagttgcccatacaggccccctctcaggccgcactgtacgcggctttcaggctccctaaaagatgtaaaatatagaaaaacaataaaaaagtactttataaaaatatgcccgtggataagtggataaccacgagggggaggtgatttttcaggcatttagcgtaagcagaatttataagttctgttccctggtgcttcctcgctcactcggggcttcgccctgtcgctcgactgcggcgagcactgctggctcgatcatatccgtggccggaagatactactcctcccccgagtcgctctccagagcccgctacagcgagacaacccccacgaagatttctatcgtccctgcagacatattcgaatcgtttttattaaccctggctcccgtcgtgacagaacactacgtcctgtaaaagggggactaaggcccctgaatcacacacctgaaattaataatgcggagttttacgataatgtcattgctggaaactttcctgaccgcttctcccgcttctcagggggcaacaatcctgttccttgccatgctgatctactggcaaaagcgataaatccatgcgggctggcctttggccagcttcgctgtataaggggaaaaatgcggcatatccagacatttcactaggcaatttgaattcagatatctatgcttgggatccggtcaacaggaggtaacaagatgaaacttgaaactatacatatagataataccgtaagaagtggtcttaattctttcactgacggggtgatttttcgtgatacaaaggtattgatcacgctcaatctcccggatggacagaaaaccactattgagggggaatggcggcatatgtcggacgccaacaggttgtcagaacgtattacgatgcttcagcatgcaatctatgagcagtatgaggaatacagagcagatattcccgtcagctggtccagataactcaccggcgagcaggacgttcgccagcatcattctcctaagtacttaaatattccctttcagcatggctaccgcatccgcttcgggcatctgaaactgaactcgatgccgagcagcaacatcaagtgcgaacaccttcgtatagacttccgtcgagctaatcgatttgtggcccatcaggctctgcaaaaccttcagtggtatgccggcatacagcatatgcatcgcgtaggaatgacggaacgtatggggggttaccggtactgagaacgtcaccccgtcggccgctgcggcctccaccgcttcgctaagccaggtgcgcacggtacggtctgtgatctcccagatacgcgccttctccattctgccggtgcgcttgtttcgtctttccagcggaattttcagggtggccaccatcatctgcagctggctgacgtagtggtgatcggaaagcggaaccaggcgatgagcctggctaccggcgggaactcggccggccgttctggcggctttctcggtgcgctgcttgagcgtggccagctgcacgaacggatacggcggcgccagcgaaaaatccccccgggtcagcgcgagcgcttcattaatgcgcgcgccggtgttccacagcgtcgccagcagcatcttgcggtgaagatccggcacgtaatggagcagggcgctcacttccggcgccagcaggtatttcggcagttcatcctgcacgagcgccatctggcgcagggcgagggcggcagggtaatcgatggccaccgggagcaatgttccgggagattgcggagatccaactggaaccaggttattcataatttctgttaacttttttctttgccgagaattttcttcgtaatattaccggagtcaggatgactagccagccagaaaacagacgaagtcgcaaacaaaactaccccgtcagtgattacagacacgatattttcgggcactggtttcagtcctcttcagtgggtggctatggaacgggaacattcatgccaccaacatccacttgataaagtacagaaaaatcaccacgcccccccagaataaggtcaggttagcgactttcccccacaggatagaaaggagctttgtctgcaggtcaaggaggtattcactttgcgaggcaagatccctttcgagctcaacgattttttcctgcgactgactacacagggttgccagccggataaccccggttgcccgttgcgccacctccaggtcagaatccccgctctgcggcagagacagtttttctgcccgcagtggcagggcgtcacatttctcgtccgggagctggccccctttcctgtgcaacagatgataaaatggacgattcctaagtgaagtaattaactgtttttgcgaccgttttttgccttcgagctgcacgattttttcctgcagcccgcgataacagtcttccagccggcgtaccgcggataccaggggctccacccggagcgttgaacacctgccccgtggcaactgcagttcgtctgcccgcagcggcattgagctggtttcccccggcgggaaccggaaacccagcccacgccacagtctgctccggcggatcagattgtgaatgtttttcgcatccacggacgaaatgtggatttgtctgaccagcgtttccggcggcagggagcgggtccagagcaccatctgctgcatgatccagctgcccactccccgaccacggggtaaaaattcattcagcataaattcaacactgaacagttccacacggccgtgctcgaacttcgcgacaatggtctgcggtgtactttgtccgtcaccgtacagcgtcaggctacaggtgatccacagatatgcccctggcgagtcctcagacccgtaacgacattcctccacccgtctgacgaccacaaccaccgtttcgttgcccgcgctccccgccgggacggtcagcagccacatgccgttatcatcaacagacgtttttatgaaggttttagttttcgcttccataccggtctctttgtcccgttgcgtaactgttacgtggatgaatgggtaattcccgtcagttctggtctgccataaaacggccagcgcttgtcgccctgcgagtaaacctcgatccacaccagtgtgccctgctcaaaatacaggtgacagccgtcactggcgctcagggtcgtcatcatcggcagctgcgcagcggaaaacgaaacgcccggacctggtaatgccggcatcattgactgttatcctccgtctccaggaatggctcatttgtgttcaaattaatcacagttctgacccacgataaatatcgtcagtcccccgggaaccttcattgcggccagttcagtacaattcccggccaggatcttcatgttttccgctgtggcatccaccggataaagcgcctgtgtcaggagtgacagattatgctcactgcaggaaagccccgcgcggtgaagacatgacaggaacccttttttaactgctgcggcatcggcggcatccatcatattgaagtaatccagaggcgccggcgaaaattcctcctccgcgacggtttcaagaaaccgtagcatctccgggcgaactggcaggggcagaaccgcggcctgaaattcgttacagctgaatccaccacaactctgcgtcgccagtcgccagccatcggtgttaccgttcggcacagttaccgtagaggccagaaccagccccggccagcgatcttcccgatcaaacccgtaatcaaaacactgctcaggaatgtcccgcagattcttgccatgttgtccgggcgctatcatcccgaacctgatttggggagtatgcttatacacagactgggcctgttcgttagtactttagttgagaaacagcgctggcatttcatctgacatcatcacatggcgggtccgcttcccgcgaaaaatacggcgcatcatcggcgtaaaatcacagggctcccagccataaggccaggtatagtaaatcccgtccttcagcttactgtcgcgtcgctcaggccctgcaacgatacgtctgacctccctgttcagcgcctcaccgcgcaggccatactgccccaggtagcggcgcagccgcgttctgggcatccgcgggtcagttttcacgtaaccattaacatccatatgctgcgtggcggtgatgatagtcatgccgtacctgcgtatggtgcggaaggcggcggccatcacgtccgtttcggtctctggttcgtcatatgttctgttcatctggtttcctgttatacgttgccgtgatgcaccgaatcattcatcatttttttctgtatgttcagtagcgttatccggaggggtagcttcggccacttctttcagtattgatgaccatcccccggcaaaccattcgcccggatcttcaccactgagtacctgctgcagccagcgggaaggggagcgacgtctggcgtcacggaaccagaccggatggtgctgacccatgactgaccagaaatcaaaatccggctccggggggagaacacatacgcattcatgaccagattcccgccgtgttgtctgaggaacaacaaaaattctttcaggtttacatacccccccggccccataccggcaccaaggaaaaacgcctctgttaccacgccggcagtgatacggccgttctgctcatgctggcgcaggatcatcagggtgccatcatggcgcccaccggcgatgcggatgaactcaaagacatacctttcatcatcatccgggaagaaaaactcctcccagctgacaccaaaatacgtccccaggatcaccagcgggaacatcttcccgtcaccggtggtcagccagtctgcactggcgccgaaccggctttcaatccgttcagccagctcacgggttaactcaccggcgccatcgatacagtccaggagcagtcccggggaaacatgtaaccggtgagctatccgtacctggtcggcgatccgcgtcggcccgggttgcccggcccccgggaaaaagccgtcagcggacagacggtcaaacagggcgcgcagacgcccgccacattccttctgccactgttgccggctggagaggatttccggagaggtggtcccggcaggatactgtctggccagcgccaggcggatctccccttcgagtgaacgttcatttttcatcgctgactgctcaatgcgtgcaaacagcgcatcgtcaacatttctggcctggatcttcgccatgactccttccttatgcaaaacgtattcaggactggtaaatggtctttgaagtaaacatgaagcctgatttaccgctataacaataaatgtatacgttatgattcattttgtacacaaaggaagaaatcagcacgtgataaggcatgaaacagtcacgcagctaaattaccggatggccgtttccggcagatccgatttttttgcgtataacaactttccggaagtgtaccacggtcagggaataagcaaagcggcgttttccggtggtgagcggccggtcacgggggaggggagggacacaacatatagcgtcatcctcagctgggaacaccgctacatcttgtgttgccgggccgctgcgcgccggagccgttccggcagatccggaactagcttttttcggatctgaccgggaaaagagagaatacaacataggttcaacatatccatatgccgggcatctgcataggtgtggcatacgcatatacttaccatctgcatatgctatgactatacatatgctttgcatctgcatatactgaacatagtcatacaggccggtcggccaggaggaaatgatgagaactgtatccatttttaaaaacggcaataaccgcgccattcgtctgccccgcgatctggattttgagggagtgagcgagctggagatcgtccgggaaggggacagcattattttgcgtcccgtccggccgacctggggctcgttcgcgcagttcgagaaggcagacccggactttatggcggagcgcgaggacgttgtcagcgacgaaggacgatttaacctgtgaacaagacctatatgctcgacacctgtatctgctcgttcatcatgcgcgagcagccggaagccgtcctgaagcgcctggagcaggcggtgctgcgcggccagcgcatcgttgtctcggccatcacttattctgaaatgcgcttcggggccaccggcccgaaggcctccccgcgccacgtcgagctggtcgacgcgttctgcgcccgcctcgatgccatcctgccctgggatcgcgctgcggtggacgccaccacggagattaaggtggcgctgcgaatggccgggacgccgatcggcccgaacgacacggccattgccgggcacgccatcgccgccggtgccgtgctggtgacgaataatacgcgggaatttgagcgggtaccgggtcttgtgctggaagactgggtaagataacgctgtaaaacaaaacaggcggtctggcgcagccggacactctttcagtcagcggtatataaaggaataaaagatgcctctgatcacgcggcttatgctgcaaaactttaaaaagtttccggaactggacctgcgcttcactcatgaccgtaacattctggtcggggacaatgagtccgggaaaagcacgattctgctggcccttgaccttgtgctgagtgacagccggcaccgggtcgaggcattgggtgtggaatcgctcctgtcccagtcagcagtaaggcagtttcaggaaggtgagcgccgcgccgatcagttacccgtgctgacagctgacgttttcctgagtaatgggggagatcctgacctgaacggcaggcaaaatctggcgggtatcaatgcggatggtctcagaatgcgtattgcaccaatgacggaggaatacggccaggatattcacaatgtactacagcaggatcccgataattttccctatgaatactattccgtgcggttcagcaccttctccggtggtcatttcgccagcttcagacgctatctgcgccatctgctcttagacagtgcacgcatcgataacgagcacgccgcacaggaatatacgcgcacagtttacagcgtcaatgtgccggtggccgatcggtaccggcttgaaaacagttaccggcaacagaaaatgcacttctgcacccggcatctgtcagccataaacgacacgctggaaacgtatcagtttggcgtgcgttccggtgctaaatcagggcttgaggcgaatctggacattaccgaggacggtatttccattcgtcaccgtggaaaaggaaggcagtgcttcatcaaaacggagtttgcgctgcagcggcatcagcagcagggagagctccacgtactgttgcttgaggagccggaaaatcatctcagccatgtcagtatgaagaggctggttaatcagcttgccactgaacggcagacgcaggtgtttattgccacacacagcagccatatctcctcccgcctcgatctgcgtaaggcaatcctcctcgggtctgcccggccggtactgatgaatgaactttccgctgagactgccgccttcttcatgaaagcaccggataataacgtactggaatttgcgctggccagacgtgtgctgctcgtggagggggatgctgagtttattctgatcgaggccttttatcgccgcctgtatggcagggcaccggaggaagacggagttcacatcatcgctatcggcggaacgagtttccgtcgttatcttgaactggcccgtcttctggaaaatcgcgtcgcggcccttcgtgataatgacggcaactatcagcaaaactgcgatgaacgctatgctgacgtgatttgttcccgctcccgggtatttgctgatcgcgataacacccgatccacatttgaaatcagcctgtatcaggataacgctgatctgtgtgatacgcttttccgcggaccccgccggacactcacggtgcaggaatacatgctggccaataaggcagaagcagcattccggctgttacagctgcacgccggagagctgaccgtacctgattatattcaggaggcactggcatggataagagagtgatatttgcggttgccggctcgggcaagaccacgctgctgatacgacggttgagtgaggacaggaggacgctgctcctgaccttcaccgtgaataatgaagcgcatctgcgggcacagattatcagacgttttggctttatcccggaagggatcagggtgatgacctggtttgagtttctgcacggtttttgcttccggcctttcctgcaggagcagctggcatcgcgtggcctgagcttcgaccagcccccacccagaataccgcgcacgaatgcccggcattatcaggatcccgccggacggctgtatcaccggaggctcgcacatttactgacagcccgggggttgctgccggatatccgtatccggcttgcccgttactatgatgaactgcttgtcgatgaagtccaggactttgccggacatgactttaattttctgctggagctctgccgcgcggaaatcactgtgctctgttgcggcgatttttatcagcatacctttgatacaagccatgacggcaacgttaattcaacgctgcacgacgacatcacgcgatatgaggcccgcttcgacgcagcaggtttcgcggttgaccgggacacgctcaaccggacatggcgttgctcagcttcagtgtgcgagtttatcaccgggcaactgaacatccgtatcgctgcccatgggatacatgcctccctgattgaaacgatcgcagatacagagcgctcagccaccctgcacgccgataatacggtgattaagctcttctatcgtgaacatcaccgttacggctgctattccatgaactggggcgccagtaaagggctcgatcactttcaggatgtctgcattgtgatgggatcctcccactggaagcttctgacccgtcaggaactggcaacccttccaccgtcgtcccgtaacaggctgtacgtggcatgctcacgggcgcgcggcaacatttattttgttcccgaaactcatctgcgccgattccgaaactgagttaccgacttctcagtcgggcacaaatcagtaaaaagcgagggtcatcgacgggaataccggctggacaggtgcggttccggttctcgctttccggaacctggctaacaatatgtaacattatcattaaatacaattatgccagttatttttattcgcaaaatgctaataatgtggcatacacgccagtatgaaaacatggtgatgctaccaacttgctgatttagtgtataatggtgtttttgaggtgctcccgtggcttcagtctccgtctgctgtccctcctgttccgctactgaaggcgtgatgcgtaatggcaaaagtactgccgggcatcaacgttatctctgctctcactgccgtaaaacatggcagctcaccttcacttatgccgcttctcagcccggtacacaccagaaaatcattgatatggctatgaacggcgtcggttgccgtgccaccgcacgactaatgggcgtgggcctcaacaccattttgcgccatttaaaaaactcaggccgcagtcagtaacctcccggatacagccgggcagtgatgtcattgtctgtgcggagatggacgagcaatggggctacgtcggtgcaaaatcacgtcagcgctggctgttttacgcgtatgacaggatacgcagggcggtggtagcccacgttttcggtgaacgcactatggccacactggagcgtcttctgagcctgctgtcagtttttgacgtggtggtatggatgacggacggctggccgatgtatgagtcacgtctgaagggaaaactgcacgtcatcagtaagcgttacacgcagcgaattgagcgacacaacctgaatctgagacagcatctggcaaggctgggcaggaagtccctgtcgttctcaaaatcggtggagctgcatgacaaagtcatcgggcactatctgaacataaaacactatcagtaaattggagtcattaccaacttttgctgagttgaaggatcagatcacgtatcttcccgacaacgcagaccgttccgtggcaaagcaaaagttcaaaatcaccaactggcccacctacaataaagccctcatcaaccgtggctccataactttctggctggatgatgaagctattcaggcctggtatgagtcagcaacaccttcttcacgaggcagacctcagcgctattctgaccttgccatcacgactgtgctggtcattaaacgcgtattcaggctgaccctgcgcgctgcgcagggctttatgggggcacctcagaaaacggaatctatggtcactcccgtttttgcaacaccgattttgacgacaagttggcttgcttgaatctatccggcgtctgaatgggattttattcccgcgcctcgatgagttccgcgcctgatgaacctccagaaaatatacggcttcaatgagcctttccgttttacaggttcctcaacaggccggtgggccgttagtatcatcaatatcagtattcgcaaaaccagatgaatgattgtttaaactggtgtatttctgcctttatgcttcgtaagtttgctgtcgcgccgtcagtgcccaggctattctggccagcttgtttgccagagcacaggtgacgacaaagttgcttttccgacacaacaactccctgacccagtcggccaacttgccagactggtgttccagtttttgtatgaataccctggcacactgaaccaacaaagttcggatctttttgttgccccgcttgctaatccctaacaatgtcgtccgacctcccgtgctgtactgtcggggtaccagccctgttgccgccgcaaagtcacggctgctggcgtactgcttcccgtcgccaatctcagttgaaatagtactggcagtcagcgttccaacgcagggaatactcagcaagcgctgtccaacctcatcttcgtccaactttcgtttcaactgagattccagatctttaatctgctcaacaagatagtgataatgctgttgtaatttcagcagtaactggctgagataaagaggcaaactactgtcctcaagaagggtactcagtcgactaataacggcagcacctcgcggaacgctgataccaaattccagcagaaaagcatgcatctgattagttgttttcaccttatcctgaaccagggattcacggacacgatgcagagctcgcattgcctgctgagattcggttctgggctgcacgaaacgcatagatggacgtgatgctgcttcacagatagcttcagcatcaacgaagtcatttttgttgcttttaacgaatgggcggacaaattgcggtgatatcagctttggaaaatgccctaactcttccagcttgcgtgccataaagtgagaaccgccacaggcttccatcgcgatggttgttgccgggcatgtcgccagaaattcgattagctttggtcgggtgaattttttacggtaaacggccttcccacgatgatcctgacaatgaatatggaaagagttcttacccagatcgataccaataagcgcaatgttttccatgatggttctccgaatgaaagcctgtcctcagcatagtactgggaaggagggagtgaccatctcattaaataaagcacgctaagccggttgcagcggtcgtagcggcctgaacttgcccgcgccgatcttggcgctgctgcgccagaggtaatcgccggtgaggttgatgtgctcccaaccgagcggcgacaggtactgcaacagcgcgtcatcaatggcatggccgttgccacgcagcgcgtgcgcagcccgttccagatagaccgtgttccacaacacgacggcagccgttaccagattgaggccgctagcccggtagcgctgctgctcgaaactgcggtcgcggatttcacccaggcggttgaaaaacactgccctggccagcgcattgcgcgcctcgcccttgttcaggccggcatgcacgcggcggcgcagttccacgctttgcagccagtccaggatgaacagcgtgcgctcgatgcggcccagctcgcggagcgccacggccaggccgttctggcgtgggtagctgccgagctttcggagcatcagggaggccgtcaccgtgccctgcttgatcgaggtggccagccgcaggatttcgtcccaatgggcgcggacgtgcttgatgttgagcgtgccgccgatcatgggtttcagcgcgtcataggcggcgtcgcccttcgggatgtagagcttggtgtcgcccaggtcgcggatgcgcggcgcgaagcggaagcccaggaggtgcatcagggcgaagacgtgatcggtgaagcccgccgtgtcggtgtaatgctcctcgatccgcaagtcggactcgtggtacagcaggccgtcgagcacgtaggtcgaatcgcgcacgccgacgttcacgaccttggtgtgaaatggcgcgtactggtcagaaatgtgggtgtagaacgtccgccctgggctgctcccgtatttcgggttgatgtggccggtgctctcggccttgctgccggtgcggaagttctggccgtccgacgatgaggtggtgccgtcgccccagtgctcggcgaagggatggcggaactgtgcgttgaccagatcggccagcgccgccccgtaggtttcgtcgcggatgtgccaggcttgcagccaagccagcttggcgtaggtcgtgccggggcaagactccgccatcttggtcaggcccaggttgatcgcgtcggcgaggatcgtggtcagcaacaggttcttgtctttggccgggtcgcccgatttcagatgcgcgaaatgccgagtgaagcccgtccattcgtccacctccagcagcagttcggtgatcttgacgtgcggcaggatcattgccgtctggtcgatcagcgcttgggcggtgtcgggtaccgccgcgtcgagcggcgtgatcttcaagcctgactcggtgatgatggcgtccggcagctcgttggccgtcgccatacggttgacggtggcaagctgtgtttccagcagcgtcagccggtcgttcaggtaccggttgcagtcggtggccacggccagcggcaattcgctggcctgcttgaggctggcgaatttcgcgggcggcaccaggtagtcctcgaagtccttgaactggcgcgacccctgcacccagatgtcgccggaacgcaacgcgttcttcatctccgacagcgcgcacagttcgtagtagcgccggtcgatgccggtgtcggtcatgaccagcttctgccagcgcggcttgatgaactcggtcggcgcgtcggcgggcaccttgcgggcgttgtcgctgttcatgccgcgcagcacctcgatggcgtcgagcacgtccttcgcggcgggagcggcccgcagcttgagcacggcaaggaattccggcgcgtagcggcgcagcgtggcgtagctttcgccgatgcggtgcaggaaatcgaagtcctcgggctgcgcaagcttctgcgcttcggtgacgctctcggcgaaggcatcccaggacatgacggcctcgatggcggcgaacggatcgcggcccgcctgcttggcctcgatcagcgcctggccgatgcggccgaacagccgcaccttggcgttgatcgccttgccggacgcctggaattgctgctgatgcttgttcttggcggcgttgaacagcttgcccaggatgcggtcgtgcaggtcgatgatttcgtcggtgacggtggccatgccctcgatggcaagcgccaccagggtggcatagcgtcgctgcgcctcgaacttggccaggtcggcgggcgtcatctggccaccctcacgggcgatcttgagcaggcggttctggtgcaccgaccgctcgatgccagaaggcaggtcgagcgcctgccacgctttgaggcgttcgatgtgttccagcatgtgccgcgaattcggtttgacgggcgattggcgcagccaggccagccaggtcgttttgccgttgtcccgacgcttgagcagatcgtcgaggcggcggcgatgcgcgtccgacagcggttcggccaaggcatcgtagatgcgccggttggcgcgggtgattgcttcggcgctcgcccgctcgacggcgttgagggcaggcagaatgaccgactgctgccgcaggtgctcgatcaaggtgctggccagcacgatgcccttgtcggtctgcaaggccatctcggtcagcaactggacggcctgccggtagtggcccatggtaaagggctggaagccgaacaccgtttgcagttcgaccaggtgctcgcgccgggtctgctcccgctgcccgtattcgtcccagctttcgacgctgaccttgagctggtcggcgaccagtttcaacaagggcggaaacggcggctcatcgacgcccaggatgacaccaggaaagcgcaggtaacagagctgcacggcgaagcccagccggttggccgggccgcgccgctgccggatgatggagaggtcggtttcgctgaacgtgtagtgacggatcaactcatccttggtgtccggcaacgccagcaggctttcgcgctcggcggcggacaggattgaacgacgtggcatatttactgatccgttctcaagtattgatacagggtttcgcgactgattccgaattcacgagccagcttggcactgttgcaaagttagcgatgaggcagccttttgtcttattcaaaggccttacatttcaaaaactctgcttaccaggcgcatttcgcccaggggatcaccataataaaatgctgaggcctggcctttgcgtagtgcacgcatcacctcaatacctttgatggtggcgtaagccgtcttcatggatttaaatcccagcgtggcgccgattatccgtttcagtttgccatgatcgcattcaatcacgttgttccggtacttaatctgtcggtgttcaacgtcagacgggcaccggccttcgcgtttgagcagagcaagcgcgcgaccataggcgggcgctttatccgtgttgatgaatcgcgggatctgccacttcttcacgttgttgaggattttacccagaaaccggtatgcagctttgctgttacgacgggaggagagataaaaatcgacagtgcggccccggctgtcgacggcccggtacagatacgcccagcggccattgaccttcacgtaggtttcatccatgtgccacgggcaaagatcggaagggttacgccagtaccagcgcagccgtttttccatttcaggcgcataacgctgaacccagcggtaaatcgtggagtgatcgacattcactccgcgttcagccagcatctcctgcagctcacggtaactgatgccgtatttgcagtaccagcgtacggcccacagaatgatgtcacgctgaaaatgccggcctttgaatgggttcatgtgcagctccatcagcaaaaggggatgataagtttatcaccaccgactatttgcaacagtgcccgggaaactgcgctgccggagagtgtgctgcgtgaaccacaacgggagcgggaagcggtccgggaggttgcccgggaaaatctgctgcaggagcgtctgcagcagatggagcgggatatggtccgtgacctgcagaaagagaaaaccctgggcggagactgatacaggaaggcaaacgctgatgacaacggataacacgaacacgacacgtaacgattcactggctgcccggaccgatacctggttgcagtcgttgctggtctggtcacccggacagcgggatatcatcaaaacggtggcactggtgctgatggtactggaccacatcaatctgatattccagctgaagcaggaatggatgtttctggccgggcgtggagcctttccgctgtttgccctggtgtgggggctgaatctgtcccgtcatgcgcatatccggcaaccggccattaaccggctgtggggatgggggattattgcccagttcgcatattatctggcaggctttccctggtatgaggggaatatcctgtttgcctttgcagtggcggcacaggtgctgacgtggtgtgaaacgcgcagtgggtggcgtacagcagcggccattcttctgatggcgctgtgggggcctttgtccggcaccagttacggcattgccgggctgctgatgctggcagtcagccaccggctgtaccgggcggaagacagagcggaacgtctggcgctggtcgcctgcctgctggctgttattccggcgcttaaccttgccaccagtgatgcagcggcggtggccggtcttgtgatgacggtgctgaccgttggtctggtgtcgtgtgcaggaaaatcattaccccgtttctggcccggggattttttcccggtattctacgcctgtcatctggctgtgctgggcgttctggcgctgtgacgggtgtggtatctttgaccgcaagaggatgattcgtcagaggcagaacacagcatgacagagcagaagcgaccggtactgacactgaagcggaaaacggaaggggagacgcctgtccgcaggcggaaaaccatcatcaatgtcaccacgccaccaaagtggaaggtgaaaaagcagaagctggccgagaaagcagcccgggaagcagagctggcggcaaaaaaagcgcaggccagacaggcactgtccatttatctgaatctgcccacgctggatgaggccgtgaataccctgaaaccctggtggccgggattgtttgacggtgacacgccccggcttctggcctgcggtatccgggacgtgttactggaagacgtggcgcagcggaatatcccgctctcgcataaaaaactgcgcagggcgctgaaggccatcacccgttcagaaagctatctgtgtgccatgaaagccggtgcctgccggtatgacacggaagggtatgtgacggagcatatttctcaggaggaggaagcgtatgcggcagcgcgtctggataaaatccgccgccagaaccggataaaggcagaacttcaggccgtgcttgatgagaaataaaaaaaagcctccatcagagaggaggcagggaaataaggcttaaaaggaaataacttccgtacccgaaaggaagccaattcagtagattatttaacaccataatactgacgggttaaagaggagtgataaagatgaatggattcagaaacagttcacggaacggtcaggtctggcgctggcagcgtgccggaagccgtgccgtcagcctggaggtcaggggattccggaaggaggccgctgaagcgtggctcctggctgcccgtgttgctccccgtacagactggcagcagtttgcacggcagagagccgaacgctgtcagcgacggagataatgaaaaaaaacggcaaaaaaaagacttcccctgagcaaaggaggccaaaaatcattcatagcgtattactgacattgaatgaatgctctgtacatcaaccctgtgaagctaccaccggttaatgccgggaggttgcgggaagaaagataatacacagtcattacgtggttaatatctgtcagaatgttttttgtgaccataaactgtcagatggataaaaaagaccgtcatgtgacggtcagtgttgtcctgtcagggacaaatgcattcagtaaggagagcaaaataataacatcacgttgcccggctgttaatatcaggcgatgttaagtgttatttatgactcttttatctggttgtgaagtctgttaatcaggaagagaaaatggcgaccggaaaatcagagaagcaacaggtgattgcctttatcgattacgagaactgcagtaacctgacagaaatttccttaaatatatatacggagttaattatattcgcgggtgcgaaacagaataatgtggcactgccagtaaacgctttccctgaagcagtaaaaatcacactccggcatgtcagtgaagtctcccggaacaatgttgattttcatctggtgctggagctggggcagtgtgtatgccactacgggccggagaaggaataccatattgtttccgctgacaagggatatgacggtattgtccggacactgcaggcgcgcgggattcgctgccgtcgcgtctccccggataaggcgtcatcagtaaagatggctgcacccgacatggatatcgttatccggtgggcaaacaaaattcaacaggcagcgcgggaggttcgtaatatgccggtaacagaaaagacatttaataattatttaaaatcacagatgcgcggtgaatggcgtgatgtcctgaccagaggtatccgggatgaactggtccgtcgcggggtaatgaaaattcaggggaataaaatcatctggtaagactgccagaataaaatgatatttattttatttataaaaacagaaaggtcgaaaatcaataatggcatttatttccatgacaagacagaaagcgccgtacagatatgcaagcaagacccggttatcgataagacgaacagactcaggctctgccgggtgttatgtgacggttgccgttcgggggaagcaggaatttattattgctgaacttgattcagaaatccggaaaatcaggctgaaactgacggactcctatgaagaaggggtaaggctgtcttcgggcacgtttacgcttccggccagattctgccgggaaatactgccggacgacgtcaggagtatcaccattattctggaaaaaagcgacgatgagtggtggtacgggagttactgatatgtggcagaactccggacactgacgccttcgcgttgctcagttgtccaaccccggaaacgggaaaaagcaagttttccccgctcccggcgtttctgcaataaaaagcaggggcatggaggtcgtcgtaaccagacaggaatgtggtattatcgcggcgggtgtctgagcctttctggttcaggcaagacgcaggtaccagaaatgcgaagaccccactcgttaatccattaactcgtgaggtctgcatgaagtacttagcactactgattgtagcctcttctttgcagagaggtcaaagtttatgacgaaatatgcccttatcgggttgctcgccgtgtgtgccacggtattgtgtttttcactgatattcagggaacggttatgtgaactgaatattcacaggggaaatacagtggtgcaggtaactctggcctacgaagcacggaagtaagctgccgggcggggacggaagtccccgctttccggaagtgtgaggtatttcaggggcagacacccgacatgccagaaacagccggtcccgcccggggccggcatccaggttaaggcatttcctgtttttcagtcatttcatcatcaaaatcacattaaacggtcgtaatcagacatgatttgtgcgccaacacagatcatcatcacaactttcaagtcgctgatttcaaaaaactgtagtatcctctgcgaaacgatccctgtttgagaattgaggaggcgagatgtcgcagacagaaaatgcagtgacttcctcatcaggtacaaagcgagcataccgaaaaggtaatcctctgacgcttgcagaacgtcagcaggcatctctggcaagaaaacgtgccacacataaagaactcagagtgttcattcctgctgcgttaaaagcgcaattacaggagatgtgtgacgctgaaggtgttactcaggctgagatgattgctgaactgataaagcagaagagtgctttcagctaactaaaatgtagcgacatcacattcttgcctgtttgtggtgtgcgtgatagattgctgatcgtttaaggaattttgtggctggccacgccataaggtggcagggaactggttctgatgtggatgtacaggagccagaaaagcgaaaaccccgataatcttctttaactttggcgagtcagaaagattaccggggctaacaagaaactgcatagaagctgttgctctatgcggggagtatagttatatgcccggaaaagttcaagacttctttctgtgctcactccttctgtgcaacataagtgcaggatggtgtgactgatcttcaacaaacttattaccgccaggtaaagaacccgaatccggtgtttacaccccgtgaaggtgccggaacgctgaagttttgcgaaaaactgatggaaaaggcggtaggcttcacctcccgttttgatttcgccattcatgtggcacatgcccgttcgcgtggtctgcgtcggcgcatgccaccggtactgcgtcgtcgggctattgatgcgctgctgcaggggctctgttttcactatgatccgctggccaaccgtgtccagtgctccatcaccacgctggccattgagtgtggactggcgacggagtctgatgccggagtactctccatcacccgtgccacccgtgccctgacgtccctggctgagctgggtctgattacctaccagacggaatatgacccgcttattggttgcaacattccgaccgatatcacgttcacaccggcgctgtttgccgctctcgatgtgtctgaggtggcggtggcttccgcacgccgcagccgtgtggaatgggaaaacagacaacgcaaaaagcaggggctggataccctgggcatggatgaactgatagcgaaagcctggcgttttgttcgtgagcgtttccgcagttaccagacagagtttaagtcccggggaataaagcgtgcccgtgcgcgtcgtgatgcggacagggaacgtcaggatattatcaccctggtgaaacggcagctgacgcgcgaaatcgcggaagggcgcttcactgccagtcgtgaggcggtaaaacgtgaagtggagcgtcgtgtgaaggagcgcatgattctgtcacgtaaccgcaattacagccggctggccacagcttccccctgaaagtgacctcttctgaataatccggcccgaaccggaggcattcgcacgcctgaagcctgccagcgaacaaaaaatcagcaccacatacaaaaaacaacctcactatccaccttctggagcatccggttccccctgtttttaatacaaaatgcgcctcagcgacggggaattttgcttatccacatttaactgcaagggacttccccataaggttacaaccgttcatgtcataaagcgccagccgccagtcttacagggtgcaatgtatcttttaaacacctgtttatatctcctttaaactacttaattacattcatttaaaaagaaaacctattcactgcctgtcctgtggacagacagatatgcacctcccaccgcaagcggcgggccccgaccggagccactttagttacaacacacaaaaacaacctccagaaaaaccccggtccagcgcagaaccgaaaccacaaagcccctccctcataactgaaaagcggccccgccccggcccaaagggccggaacagagtcgcttttaattatgaatgttgtaactacatcttcatcgctgtcagtcttctcgctggaagttctcagtacacgctcgtaagcggccctcacggcccgctaacgcggagatacgccccgacttcgggtaaaccctcgtcgggaccactccgaccgcgcacagaagctctctcatggctgaaagcgggtatggtctggcagggctggggatgggtaaggtgaaatctatcaatcagtaccggcttacgccgggcttcggcggttttactcctgtatcatatgaaacaacagagtgccgccttccatgccgctgatgcggcatatcctggtaacgatatctgaattgttatacatgtgtatatacgtggtaatgacaaaaataggacaagttaaaaatttacaggcgatgcaatgattcaaacacgtaatcaatatctgcagtttatgctggttatgctggctgcatggggcattagttggggagccagatttgtcatggagcaggccgttctgctttatggatcaggaaaaaactatttgttcttcagtcatggtactgttctgatgtacctgctgtgtgttttcctggtataccgccgttggatagctccgctaccggtcgttggtcagctgcgcaacgttggcgtaccgtggctggtcggtgcgatggccgtggtgtatgtcggtgtatttctgctcggtaaggcgctggctctgcctgctgagccatttatgacgaaactttttgccgataagtccatacctgacgtgatcctgacgttgctgaccatctttatccttgccccgttgaatgaggaaacgctgttccgggggattatgctgaacgtcttccgttcacggtactgctggacgatgtggctgggggcgctgataacgtcgttgttgttcgtcgccgcgcacagccagtatcagaacctgctgacactggcagaactgttcctggtggggttgattacatcagtggccaggatcagaagtggtggcctgctgctgccggtattgctgcatatggaagcaaccacgctgggtttactgtttggttgaaagttatatttttattaaacattgtgcgttaaagcctggtgtgtttttttagtggatgttatatttaaatataacttttatggaggtgaagaatgcataccacccgactgaagagggttggcggctcagttatgctgaccgtcccaccggcactgctgaatgcgctgtctctgggcacagataatgaagttggcatggtcattgataatggccggctgattgttgagccgtacagacgcccgcaatattcactggctgagctactggcacagtgtgatccgaatgctgaaatatcagctgaagaacgagaatggctggatgcaccggcgactggtcaggaggaaatctgacatggaaagaggggaaatctggcttgtctcgcttgatcctaccgcaggtcatgagcagcagggaacgcggccggtgctgattgtcacaccggcggcctttaatcgcgtgacccgcctgcctgttgttgtgcccgtaaccagcggaggcaattttgcccgcactgccggctttgcggtgtcgttggatggtgttggcatacgtaccacaggtgttgtacgttgcgatcaaccccggacaattgatatgaaagcacggggcggaaaacgactcgaacgggttccggagactatcatgaacgaagttcttggccgcctgtccactattctgacttgaacatggggtttgaggggcaactggatgaaaacgtacgatttagggcactaaaaccgctgttgtcccaccattctggtgattcccaaacgttatttggctaaaaagtagttttgatgtggtttattttccgaattccaagcgcagccctactttcttgtgcgtatttgcgtgttttgcgcagttttgaagttccggtgatgctgccaacttactgatttagtgtatgatggtgtttttgaggtgctccagtggcttctgtttctatcagctgtccctcctgttcagctactgacggggtggtgcgtaacggcaaaagcaccgccggacatcagcgctatctctgctctcactgccgtaaaacatggcaactgcagttcacttacaccgcttctcaacccggtacgcaccagaaaatcattgatatggccatgaatggcgttggatgccgggcaaccgcccgcattatgggcgttggcctcaacacgattttccgccatttaaaaaactcaggccgcagtcggtaacctcgcgcatacagccgggcagtgacgtcatcgtctgcgcggaaatggacgaacagtggggatacgtcggggctaaatcgcgccagcgctggctgttttacgcgtatgacaggctccggaagacggttgttgcgcacgtattggggtctgacgctcagtggaacgaaaactcacgttaagcaacgttttctgcctctgacgcctcttttaatggtctcagatgtcctttggtcaccagttctgccagcgtgaaggaataatggccgagcatattgatatgtccgtggcaaagcggggagaggcgtgcgatatcttcatcattcagtgtttcaccctgcgcccggagatgatccagggctgcctgcatataaatagtgttccataacacgacggcgttagtgaccagccccagtgcgcccagttgatcttcctgaccgtcggtatatcgttttcttatctcacctttttgaccgtgacagatggctctggcaacggcatggcgactttctccccgattaagctgggtcagaatgcgccggcggtaatcttcatcatcaatataattaagcagatacagcgttttgttgatgcgccccacttcaatgattgcctgagtcagtccggaaggacgttcacttttcagcaatgaacggaccagcactgaagcctgtactttgcccagcttcagggagccagcggtccggatcatttcgtcccactgaaggactatttttggcactgttgcaaagttagcgatgaggcagccttttgtcttattcaaaggccttacatttcaaaaactctgcttaccaggcgcatttcgcccaggggatcaccataataaaatgctgaggcctggcctttgcgtagtgcacgcatcacctcaatacctttgatggtggcgtaagccgtcttcatggatttaaatcccagcgtggcgccgattatccgtttcagtttgccatgatcgcattcaatcacgttgttccggtacttaatctgtcggtgttcaacgtcagacgggcaccggccttcgcgtttgagcagagcaagcgcgcgaccataggcgggcgctttatccgtgttgatgaatcgcgggatctgccacttcttcacgttgttgaggattttacccagaaaccggtatgcagctttgctgttacgacgggaggagagataaaaatcgacagtgcggccccggctgtcgacggcccggtacagatacgcccagcggccattgaccttcacgtaggtttcatccatgtgccacgggcaaagatcggaagggttacgccagtaccagcgcagccgtttttccatttcaggcgcataacgctgaacccagcggtaaatcgtggagtgatcgacattcactccgcgttcagccagcatctcctgcagctcacggtaactgatgccgtatttgcagtaccagcgtacggcccacagaatgatgtcacgctgaaaatgccggcctttgaatgggttcatgtgcagctccatcagcaaaaggggatgataagtttatcaccaccgactatttgcaacagtgccattcggatttcatataacctatttttgttgttcaagtttgattccttggactcttcagaatacagacagcaaataaagacctttcgtttgaagtatgtatttcttgcagcaaaaataatcaaaaccgcaagatatgtaatcatgaagttgtcggaaaactatccgtacaagggagtgtatgaaaaatgtctggtataataagaatatcatcaataaaattgagtgttgctctgtggataacttgcagagtttattaagtatcattgcagcaaagatgaaatcaatgatttatcaaaaatgattgaaaggtggttgtaaataatgttacaatgtgtgagaagcagtctaaattcttcgtgaaatagtgatttttgaagctaataaaaaacacacgtggaatttagggaatactgatgtaacacggattgaccgtattgggagtttgagatggtgacaaagagagtgcaacggatgatgttcgcggcggcggcgtgcattccgctgctgctgggcagcgcgccgctttatgcgcagacgagtgcggtgcagcaaaagctggcggcgctggagaaaagcagcggagggcggctgggcgtcgcgctcatcgataccgcagataatacgcaggtgctttatcgcggtgatgaacgctttccaatgtgcagtaccagtaaagttatggcggtcgcggcggtgcttaagcagagtgaaacgcaaaagcagctgcttaatcagcctgtcgagatcaagcctgccgatctggttaactacaatccgattgccgaaaaacacgtcaacggcacaatgacgctggcagaactgagcgcggccgcgttgcagtacagcgacaataccgccatgaacaaattgattgcccagctcggtggcccgggaggcgtgacggcttttgcccgcgcgatcggcgatgagacgtttcgtctggatcgcactgaacctacgctgaataccgccattcccggcgacccgagagacaccaccacgccgcgggcgatggcgcagacgttgcgtcagcttacgctgggtcatgcgctgggcgaaacccagcgggcgcagttggtgacgtggctcaaaggcaatacgaccggcgcagccagcattcgggccggcttaccgacgtcgtggactgtgggtgataagaccggcagcggcgactacggcaccaccaatgatattgcggtgatctggccgcagggtcgtgcgccgctggttctggtgacctattttacccagccgcaacagaacgcagagcgccgccgcgatgtgctggcttcagcggcgagaatcatcgccgaagggctgtaactggttttgttgaataaatcgaacttttgctgagttgaaggatcagatcacgtatcttcccgacaacgcagaccgttccgtggcaaagcaaaagttcaaaatcaccaactggcccacctacaataaagccctcatcaaccgtggctccataactttctggctggatgatgaagctattcaggcctggtatgagtcagcaacaccttcttcacgaggcagacctcagcgctattctgaccttgccatcacgactgtgctggtcattaaacgcgtattcaggctgaccctgcgcgctgcgcagggctttattgattccattttttctctgatgaacgttccgctacgctgcccggattacagctgtgtcagcaggcgggcaaagtcggttaatatcagtttcaaaacgcccacccggggtgaaatcgcacacctggtaattgattccaccgggctgaaggtcttcggtgaaggcgagtggaaagtcaaaaagcatggccaggaacgccgtcgtatatggcgtaagctgcatctggcagttgacagtaaaacacatgaaatcatctgcgctgacctgtcgctgaacaacgttacggactcagaggccttccccgggttaatccggcaaacccaccggaaaatcaggtcagccgccgccgatggagcttacgatacccggctctgtcacgatgaactgcggcgtaagaaaatcagcgcgcttatcccgccccgaaaaggtgcgggttactggcccggtgaatatgcagaccgtaaccgtgcagtggctaatcagcgaatgaccgggagtaatgcgcggtggaaatggacaacagattacaaccgtcgctcgatagcggaaacggcgatgtaccgggtaaaacagctgttcgggggttcactgacgctgcgtgactacgatggtcaggttgcggaggctatggccctggtacgagcgctgaacaaaatgacgaaagcaggtatgcctgaaagcgtgcgtattgcctgaaaacacaacccgctacgggggagacttacccgaaatctgatttattcaacaaagccacgcgctggacacaccacgatgacagcggttttatcccttacgccatcaccaccggccttgattacgaggcgatgaccgaacagcgcaaaggctatgagaactttgtttatcagaacggcgtttacgatctcggcaccaaaggtgatatgcgacgtaacgaacgtaacctgatgtggaacctcgatccctacattcaaacgcactggcagctcacctcagccctggggctggacgccggggcgcgctatagctcggtatggtttgattccaacgatcgttatgttgtaggtaaaaatggtgatgatagcggcgaagcgagctatcacaagtggcttccggcggcagcgctgaagtatgccatgacgccgcagtggaacgtttacctctctgccgggaggggatttgaaacgccgaccattaacgagctgtcctatcgtcccgatggtcagtccgggcttaactttgctctgcaaccggccactaacaccaccgttgaagcaggcagtaaatggcaggtgggcaccgggatggcgagcctgagcgtcttcaatacggacacgaaaaatgaaattgtcgttgccgccagcgacaatggccgtacgtcctatcagaacgcgggcaagacgcgccgccgcggggtcgaactgggatgggatcagcaatttgcgcccgcctggcgcgccaaactggcgtggacgctgctggatgcgacctaccgtgaaaacgccggcgatgctattcagagcggcaatcggatcccggggattgcacgtaatagcgcctatgcctcctttggctgggtgccggaagagggatggtacgctggcgctgaagtccgctatatgagcgatattcaggtcaacgatgccaatagcgagcaggctccagcctatacggtgacggcactgaataccggctataaatatgtgctagataactggaccgtcgacctctatacgcgcgttgataacctgtttgataagcgctacgtcggctctgttatcgtcaacgagagcaacggacgctattatgaaccggcgccgggccgtaactatggcgttgggctatcggtcagctatcagtttgattcgctgtaacaatacggctgccggagagtgctattgaggtgaggctccggcagcgggtaaaggcgttgattcctggtaacaataagctgcttattgatgtatcagtaagcatgccggcagccattgcgcttgatataatactaccccatatgagcaagagtattttcacggaaaagctagcagccaatttcggcctcgcggccttcccgcttctcaattgagcatataatttttccgcagccaaaacctgctcaggttcaggcttggtccttacagactggtattcaacaatcgaaccattcttagctattggcgttacataagcacttacccaatagtggtcgccatttttacagcgattttttactagccccatccatgagcggccagattttaatgtactccacatatgctcaaatgcagcaggcggcatatctgggtgtcttacgatgttgtgaggctggcctaatagttcttcctcagtgaaaccactgattttaatgaagtcaggattaacgtacgtgatatggctttgaggggaggtagtcgaaagggcactgttgcaaagttagcgatgaggcagccttttgtcttattcaaaggccttacatttcaaaaactctgcttaccaggcgcatttcgcccaggggatcaccataataaaatgctgaggcctggcctttgcgtagtgcacgcatcacctcaatacctttgatggtggcgtaagccgtcttcatggatttaaatcccagcgtggcgccgattatccgtttcagtttgccatgatcgcattcaatcacgttgttccggtacttaatctgtcggtgttcaacgtcagacgggcaccggccttcgcgtttgagcagagcaagcgcgcgaccataggcgggcgctttatccgtgttgatgaatcgcgggatctgccacttcttcacgttgttgaggattttacccagaaaccggtatgcagctttgctgttacgacgggaggagagataaaaatcgacagtgcggccccggctgtcgacggcccggtacagatacgcccagcggccattgaccttcacgtaggtttcatccatgtgccacgggcaaagatcggaagggttacgccagtaccagcgcagccgtttttccatttcaggcgcataacgctgaacccagcggtaaatcgtggagtgatcgacattcactccgcgttcagccagcatctcctgcagctcacggtaactgatgccgtatttgcagtaccagcgtacggcccacagaatgatgtcacgctgaaaatgccggcctttgaatgggttcatgtgcagctccatcagcaaaaggggatgataagtttatcaccaccgactatttgcaacagtgccgtaattatttaggatatagctctgtgatttagtctttttagggcgtttatttatgtctttatgctgtaatgtcggtgctgatttggtcttcaataaggcgatttttagcccgctttttccggggggatgaaatgttattggattgctaaatgatttcaaaaaaggggtaacatagagcggggattagtgtggcgaggcgcaggtttccgatggcaggctaaacgcaaaaaatgcgctttttagccggtgatgaggtgaggccgggaggggatgcgtcgccgatcacagtttacaacagggtttgataacgggaggaaaagtcatgctgcagggattgaatcatctgacgctggcggtcagcgatctggcgtcaagcctggcattttatcagcagttacctggaatgcgcctgcacgccagctgggatagcggagcctatctctcctgtggggcgctgtggctgtgcttgtcgctggatgagcagcggcgtaaaacgccccctcaggaaagcgactatacccactacgccttcagcgtggcggaagaagagtttgccggggtggtggctctgctggcgcaggcgggggctgaggtatggaaagataaccgcagtgaaggggcgtcttactattttctcgaccctgacggccataagctggagctgcatgtggggaatctggcgcagcggctggccgcctgtcgcgaacgcccctacaaggggatggtcttttttgattgacgggttagttcagcttactgccggatttcaacgtgcagatccacagcggtgaattgatagagctgagcaagatagccttttcgttgagcttctgagcgttgagaaacagcccgtcgtggctgtcggacatctcgcgcataaagtagtcgaaaatcacgttcggcgattcatcaatcgaggaggcgctcgattcccactgattgatgcggtaatgacgctcggtggccgagatgcgtttgctgctgtaggtaaacttcacgtagcgttgcaggtagagccagccggcggcggagtcggtgtaaccttcgaccaccatcgagcctttaccctgcgcgccaaaattgaagtgaatattgccgttaacgttctctttgtccatgttctcaaagcgcatgatgcccttagtggaacagctcatgacacccgcgttgtcggcaggcagcagccgccaggcgctaaacgcggcggcggcaataaataccagaacgcagagggcaaagaacggacgcggcgcgagtctcattacggcttccaggggcactgttgcaaagttagcgatgaggcagccttttgtcttattcaaaggccttacatttcaaaaactctgcttaccaggcgcatttcgcccaggggatcaccataataaaatgctgaggcctggcctttgcgtagtgcacgcatcacctcaatacctttgatggtggcgtaagccgtcttcatggatttaaatcccagcgtggcgccgattatccgtttcagtttgccatgatcgcattcaatcacgttgttccggtacttaatctgtcggtgttcaacgtcagacgggcaccggccttcgcgtttgagcagagcaagcgcgcgaccataggcgggcgctttatccgtgttgatgaatcgcgggatctgccacttcttcacgttgttgaggattttacccagaaaccggtatgcagctttgctgttacgacgggaggagagataaaaatcgacagtgcggccccggctgtcgacggcccggtacagatacgcccagcggccattgaccttcacgtaggtttcatccatgtgccacgggcaaagatcggaagggttacgccagtaccagcgcagccgtttttccatttcaggcgcataacgctgaacccagcggtaaatcgtggagtgatcgacattcactccgcgttcagccagcatctcctgcagctcacggtaactgatgccgtatttgcagtaccagcgtacggcccacagaatgatgtcacgctgaaaatgccggcctttgaatgggttcatgtgcagctccatcagcaaaaggggatgataagtttatcaccaccgactatttgcaacagtgccaacgggcatatcggcctccctgcctgacgggcatttagtaacatttttccaaccgtacgaaatgttataaattatcggacatcgtaaaactgttacattaatatgtctattaaatcgtaaatttgtaataatagacatgagttgtccgatattcgatttaaggtacatttttatgcgactttttggttacgctcgggtctcaaccagtcagcagtctcttgacgtataggaaattgaaaaaccagtcgataccattgtccacgccttatgccacgtgagcctttctgcttttcccaccactccggtggtttccctctctgtatggtcgatttttataccgtaacaggctgttttttatactttcaccgattcccgggcacacttagcctgtgtcaggccggcatatacctcagtagactgatatcccgcgcgtttttcttcagccctgatacattcagccccgcaatggcccggcggtataccatccggcagccacacagcacgcattcgaacgggtcacgactcaggaactgtttcaccatttgtgcatagcacactttcgccactggttccggtttatccatccccagtgcacggtacacctgcggcagcttctctccacacacacggttggcaaggaacccgaagtacctcaccatcttaaaaaacttctccgggatgtgctgtttcagcctcgcgaccagctcacgctgtgtcagcgtttccgtcgccgtttctcccgttttgtggtccaggtaacggaagctcaggcttgcccctccgttgtaatgagccagtcgggaagccgctattggtggcttcttcagataacgacccaggtagcgtgccgtattccgccctccggctgtcttcttcgacatgtacacatgccagtattttccgccggatttcagcaccaggcttctccactgtgattccgtcgtgatatgtgacaacgactccggcattgccatcccctctgacggcactgttgcaaatagtcggtggtgataaacttatcatccccttttgctgatggagctgcacatgaacccattcaaaggccggcattttcagcgtgacatcattctgtgggccgtacgctggtactgcaaatacggcatcagttaccgtgagctgcaggagatgctggctgaacgcggagtgaatgtcgatcactccacgatttaccgctgggttcagcgttatgcgcctgaaatggaaaaacggctgcgctggtactggcgtaacccttccgatctttgcccgtggcacatggatgaaacctacgtgaaggtcaatggccgctgggcgtatctgtaccgggccgtcgacagccggggccgcactgtcgatttttatctctcctcccgtcgtaacagcaaagctgcataccggtttctgggtaaaatcctcaacaacgtgaagaagtggcagatcccgcgattcatcaacacggataaagcgcccgcctatggtcgcgcgcttgctctgctcaaacgcgaaggccggtgcccgtctgacgttgaacaccgacagattaagtaccggaacaacgtgattgaatgcgatcatggcaaactgaaacggataatcggcgccacgctgggatttaaatccatgaagacggcttacgccaccatcaaaggtattgaggtgatgcgtgcactacgcaaaggccaggcctcagcattttattatggtgatcccctgggcgaaatgcgcctggtaagcagagtttttgaaatgtaaggcctttgaataagacaaaaggctgcctcatcgctaactttgcaacagtgcccctctgaccacgctttcagaagcagctgccgcatattccacatccaccgtgaacgcatcgcgtctttcaggaagctcagctttttccactgaccatgcttattcagacctccacaggttacagacacatgtacatgcggatgccagttgagacgacggccatacgtgtggatggcgcagaagataccgggttccagcccccgttttcgggcggcatacagcagattctccaccgccagacggcacacgtcattcagcagccagcggttgctttcgaacaccggccacagcgtgtccggcagggtgaagaccagatgtacccagtcgcagtcaggaagacgattcagctgtgttgctgtccacaggtctgtggccttctttccgcaggacgggcaggcacggctgccgcatgagttggtcaggtactttacgtgctgacagtccgggttatcacacccgaactcttttacacccagtatccgtgtgccgcaggccagcattttggtgacggcttcaacctcgatatcgcgcagaccgcccgcatccaggaaggacgtccagcactggttggctgtgaacagacgtttcagagggcggggagtaaaaccggacaacatgaggatggattaaaccccggtatcctgtagcagggtaagggctgctgtatcgccacggcgcttcaggatggaggtcgtcaccatcgcaggtggtgggtccatgggtttgagcattttcatccagtcccattctcgttgtgagagcttctcagcaccaacagagagcagaactgtatcgatacttttgcgggtcaacataaggggatgagtccttaataaaacaggtcctcagagcatacatattctgcggggcgtgcggcaacaacaggacgaaccggggcggttttcaatttgcagccgccaggctgccgtggttcatcttcaggtcagagcactcaaagacgcaggtgtgaaagcaaaccgtatatttaccgataaggcatccggcagttcaacagaccgggaagggctggatttgctgaggatgaaggtggaggaaggtgatgtcattctggttaagaagctcgaccgtcttggccgcgacactgccgatatgatccaactgataaaggaatttgacgctcagggcgtggcagtccggttcattgatgacgggatcagtaccgacggtgatatggggcaaatggtggtcaccatcctgtcggctgtggcacaggctgaacgccggaggatcctagaacgcacgaatgagggccgacaggaagcaaagctgaaaggaatcaaatttggccgcaggcgtaccgtggacaggaacgtcgtgctgacgcttcatcagaagggcactggtgcaacggaaattgctcatcagctcagtattgcccgctccacggtttataaaattcttgaagacgaaagggcctcgtgatacgcctatttttataggttaatgtcatgataataatggtttcttagacgtcaggtggcacttttcggggaaatgtgcgcggaacccctatttgtttatttttctaaatacattcaaatatgtatccgctcatgagacaataaccctggtaaatgcttcaataatattgaaaaaggaagagtatgagtattcaacattttcgtgtcgcccttattcccttttttgcggcattttgccttcctgtttttgctcacccagaaacgctggtgaaagtaaaagatgctgaagatcagttgggtgcacgagtgggttacatcgaactggatctcaacagcggtaagatccttgagagttttcgccccgaagaacgttttccaatgatgagcacttttaaagttctgctatgtggtgcggtattatcccgtgttgacgccgggcaagagcaactcggtcgccgcatacactattctcagaatgacttggttgagtactcaccagtcacagaaaagcatcttacggatggcatgacagtaagagaattatgcagtgctgccataaccatgagtgataacactgctgccaacttacttctgacaacgatcggaggaccgaaggagctaaccgcttttttgcacaacatgggggatcatgtaactcgccttgatcgttgggaaccggagctgaatgaagccataccaaacgacgagcgtgacaccacgatgcctgcagcaatggcaacaacgttgcgcaaactattaactggcgaactacttactctagcttcccggcaacaattaatagactggatggaggcggataaagttgcaggaccacttctgcgctcggcccttccggctggctggtttattgctgataaatctggagccggtgagcgtgggtctcgcggtatcattgcagcactggggccagatggtaagccctcccgtatcgtagttatctacacgacggggagtcaggcaactatggatgaacgaaatagacagatcgctgagataggtgcctcactgattaagcattggtaactgtcagaccaagtttactcatatatactttagattgatttaaaacttcatttttaatttaaaaggatctaggtgaagatcctttttgataatctcatgaccaaaatcccttaacgtgagttttcgttccactgagcgtcagaccccgaaaacgatttaggagacaccgatgaacatcaacgatgccctcacctccatcctggcctcaaaaaaataccgcgccctttgcccggataccgtgcggcgcatcctgactgaggaatgggggcggcataaatcccccaaacagaccgtagaggctgcacgcacccggctgcatggaatttgcggggcatatgtcaccccggaatcgctcaaggctgctgccgccgcgctttctgcgggcgatgtaaaaaaggcattgtcgctgcatgcctccaccaaggagcgactggccgagctggataccctgtacgattttatcttttcagccgaaactccccgccgcgtgctggatatcgcctgcggtcttaaccccttggcgctatacgagcgcggcattgcatccgtgtggggctgtgatatccaccagggattgggggatgtcatcaccccctttgctagggaaaaagattgggattttacctttgccctgcaggatgtgctgtgtgcgccgcccgccgaagccggcgacctggcgctgatttttaagcttttgcccctgctggagcgggagcaggccggttctgccatggcacttttacaatccctcaataccccgcgcatggctgtcagctttcccacgcgtagtttaggcgggcgtggaaaaggcatggaggcgaactacgccgcatggttcgagggcggcttgcccgccgagtttgagattgaggataaaaagaccatcggaacagaacttatatacttgataaaaaagaatggataagccaatcagaaggcaaatcatctaaaaaagaggaacgaaaaatatttttcgttcctcttttgttctatcgaacaagcacactacgactgctgtttttgaagcagccttttatagctcagctcgatgcccaacgcccccagcggcgctgtaagtataatggcaagaaccgccaccgcaagtatggtttccccactgccaagccccatcgccagcggaatagcgccgattgcagcctgcaccgttgccttgggcagataggcaatcatgcagaacaggcgctccttccgggataggtctgtacccagcgtactcatccacacgcccagcatgcgaaacagcagcgcagctgtgatcagcagcatgccgcttagcccggcggagaaaaggtaacggatgtggcactgttgcaaagttagcgatgaggcagccttttgtcttattcaaaggccttacatttcaaaaactctgcttaccaggcgcatttcgcccaggggatcaccataataaaatgctgaggcctggcctttgcgtagtgcacgcatcacctcaatacctttgatggtggcgtaagccgtcttcatggatttaaatcccagcgtggcgttgattatccgtttcagtttgccatgatcgcattcaatcacgttgttccggtacttaatctgtcggtgttcaacgtcagacgggcaccggccttcgcgtttgagcagagcaagcgcgcgaccataggcgggcgctttatccgtgttgatgaatcgtgggatctgccacttcttcacgttgttgaggattttacccagaaaccggtatgcagctttgctgttacgacgggaggagagataaaaatcgacagtgcggccccggctgtcgacggcccggtacagatacgcccagcggccattgaccttcacgtaggtttcatccatgtgccacgggcaaagatcggaagggttacgccagtaccagcgcagccgtttttccatttcaggcgcataacgctgaacccagcggtaaatcgtggagtgatcgacattcactccgcgttcagccagcatctcctgcagctcacggtaactgatgccgtatttgcagtaccagcgtacggcccacagaatgatgtcacgctgaaaatgccggcctttgaatgggttcatgtgcagctccatcagcaaaaggggatgataagtttatcaccaccgactatttgcaacagtgcctctcaaaatcggtggagctgcatgacaaagtcatcgggcattatctgaacataaaacactatcaataagttggagtcattaccaaacagggattatttattctctcaggcgagaataaaatagacgaagaatgtttcattaatatagtccaaacggctgtcgccataaataacatcggtagagaatctaatggttatattttagttggtgtttccgataccaaagctacggcagacagagttaagactttatatggtgttacccctattgagtgcaatggctattatatcaatggaattgatcatgaagctgtaattcaatcaaaaaacatagataattactttctgttcataaaacaaaaaatagaatcatttaattttaatgaggctttgaaacaacaaatactaaaagatatttcattatgttcatatgaaggactgcatgttttaaaaatcgaaataaaaagtgtcggagaagtctgtcattttgaaaataggtattatataagacaaggaacagctacgcatttaatcactgacggtgaagcaattagtagtttacacagattatattactcataattacttaagcactatgaaggtatcatacaccttcatagtgtacttttttactgcgctttggggctaaattgtttttgtgaatagccagaatatcgtggctacggcggcaatggaaatatatgatctctgctgccagagactggagatgtaattgggggcagtttggatatcgaaaattattgtactataaggggtccgcttgagggggccgcttggaaaacggaaattttcccacgctaagagaattgagttgaacgagtggttacatctaggccagctaactcactgaacgtaaaggctgtacgaaatgttccgaccgtccgataaccatttggcttacttccgtacatttccttgcgtagatgtacagaattgtacgatttcggacaccaaaactgctgttgtcccggtgcatgaagctactttccgggttggtggtactgactttggtgttcttaacgacgacgttttcaactctgaaaatcgcctctctgcacggggatttttacccccccatagagccgtcatataaattcaaattattaactttgatggtagaattatcttaggtttgataaaattttgagccgtcgccgtttacttcacaggattcaatataatggctaaatatacagtttgtgattaccaataaactattagaaataatgggaatggttgtgccaatctctatctggaggtcttattgcagggaacatccaccccatcgttacaccaatacagaattgcccccgatacaagacatccagacattaacctaataaaagcgcaccttgacgagggctttcagcaggcaaagtctgagggattaaaagtagagatttcagattataaagaacgtctttacctgtacattagaacacctggtaataacctaatgcaatattctggttgcagagaaaaataatacagtcgcgctggatacgctgacattgacgcagttatatgattttctggcgttggtcagtaaaccagctgcagccaaaacggtgtagtccctgacacaggcgccggtcattctgttaactcatccacgtatgggatgaacagttgtttcagtttgaaaccagggatgtcagacggatttttgctggcgagtacgaaatccgttacgaacttaatggccagactatttatgtattgcgcctgtgacacacacgagaaaacaggtagattgtgtgtgagggcaactttaacatagcctgcaggtgttaattcaggagcattgttatcagaccaaatatttttcattccattaaatagtcttgtaggggataaaatgaattacgatgaaataacgaaaatcactgcagaacgtattagcgactacatgactgaagcggttaatacagactctaaatctgttgcggaaatgtttcataacgctgcatggggagtgctatcattgtggtttgaactcgtcacaaaaatagatctggatatacataaaaagaacaggtatgcaagttatgattttagaagaaaaatcgaaatgcagcatgaagagtttcagaaaatgacagagcgtgagcaagtgcctttattgaaattgcctgaataacagagacagtgcaaacgattatttcataataacgattatgtaatgactggtaagaaaataacttgattgagttccctttatccagcctgatagtggataaagggaactcaataataattgaattaatttattagcttcatcgcattttttttggtctcttcatcacttttttgctcttgttgtgaagaggattgagtgactattgaagaattaaaatcggccatctcttttggaaatagcgatctcaatatattcacgatatctgaaaatgtggtttctttcgtcagcagctcacataaaaggaaaggggtccggggatcttgtctgtataaggccagacctgccgtcagtgcggcccggttaaggcggcttcgttccccttgcgggatactgtccagtgtatcacaaacaattttatctgtttgatttacatctggatttagtttgaaggcaatggttctgcgcttgtccatcattaattacctatgagatacataccgttaactaaatcatattgagagttattggttttgaaaaaacgttcatcacgaatctgtgtgtgtttttttactgcatcgcatattaattctgcgccaccgcctataaccataacatgagtataaccagaaaattcattgagcgtatttaatacacgttgctcaagtttacgaagtgcttcattcattgcttcggtgactattgatattttgttctcatcattaattcgttgcttcagatagttattatcttttctgtgaatgattatatcgtcagcaagatagctacttccttttgttctcgcaagagaaagggcatcttttactgcagatgtaaccagagagacaccaagagatgagtctccgtatattttactgatccccgataatttccccattacctgagaaatatctaatgtggtgcccccgagatctataattaataaagaatctaactcatccagttcttgtagaacttcataacctgccggtatagattcaggcatgacttttacatcttttattgtgaatgtatccccgccatttaatgtaatttttttccggaagtttgctttcttacgctcaatattttccgtattgggttggttatttctgtcgtaatactctgtcagaggaagtgtgcaaacaatatccacttcgcttaccggcagaccactggtcagtaaggcgtgatgcactgcaacgacattaacgtcgctgtattgccatgcgatattggttgtgactacagcatccgggctgattggatcaaatgaatactgttcgccgttcagtgtgtagttaaagacctttttatcaccaaaagagactgcccactcgcgtttgaagctgttcgggctaatgtgctgtttaattgttccgtcgctttcctgccactgtagtttgatgtttgttgaaccgtcatcaatgaataccaacatttataaaactccttatggtgtttttttggtgtgtgtttgggtatgttttgggttttaagtgggtttgtttgtcaagtttaccccatttcaaccatcaatcaatgattatttgtcttgttttggtgttttattgggttgggtatgggttgtttttgggttttgtttggcgggtaacaaaagatgtcgccgggctcctctttttactgcgccggctgacgcggcgcggcaggaacgctgcctgtggtcagtgtcccgcgtccggccgggcacgggacgggcgcttttaccgctcccggctggcgttggtgacagtgtacgccagcccgtcgcccttttctgatgaacgcccttcaagccgctttcgcggcatatcctcgccgtcaaaaagacgacggctgcggtattccacggtcggcctgacccgttaccggacgcggtgaacagcccacaggcagcggggaacgggcaccacaggggtgccctcccggtgccctctgtaagagaaggagtgctgttatgtcccgttttatcctgggtgactgcgtgcgtgttatggccacgtttccgggcaatgctgtcgatttcatcctcaccgacccgccgtatctcgtcggtttccgtgaccgttccgggcgcaccatcgccggcgataaaaccgatgaatggctgcaaccagcctgtaatgaaatgtaccgcgtactcaaaaaagacgcgttaatggtgagcttctatggctggaaccgcgtcgatcgctttatggccgcctggaaaaatgcgggattcagcgttgttggtcacctggtcttcaccaaaaactacacatcgaaggccgcatatgtgggctatcgccacgaatgtgcctacatcctggcaaaaggccgtccacgtctgccacaaaacccgctgccggacgtgctgggctggaaatattcgggcaatcgccatcacccgacggaaaagcccgttaccagcctgcaaccgctgattgagagcttcacacacccgaacgcaattgtgctggacccgtttgcaggcagcggctcaacctgcgtcgccgccctccagtccggacgccggtatatcggtatcgagctgcttgagcagtatcaccgtgccgggcagcaacgccttgccgccgtgcaacgggccatgcagcagggggccgcgaatgatgactggtttatgccggaggctgcgtaaatgaactatgcaggacacgaaaaactgcgcgccgaagtggcggaggtggccaatgccatgtgcgacctgcgtacaaccatgaatgagatggagcagcggtacagctttaatgccgacaccctgccggaacgtctggtgcgtcagacgctgtttcgcgcaaaccgcctcctgatggaggcatataccgaaattctggaactggaagcgtgctttaaagattgagaaggagacgagaatgtacggaacatgcgaaacgctatgccgggagctggcagtaaagtatccgggagacatgccgctgatgctggttatctggtccccggaagagattcaggcactggctgacggtatggaaatttctctgaccggtcatgaaatcaggaccgtcctggcacgcctggaggacatcccggaagaccagcggattgagtccggtatttcttccgctgcggtgatggagattatccgcaacgagagcgaaaaccgcctggtgaccgtccctgctgaactgctggcgtccctgattcagaccgctgaacaggcattgtggaaacgtgaatgggccgcccgggatcatggcctcgccgtcccggaatgcgtcacccgccgtcaggaggtggttaatcaggcccgcaccctgctgaaaaacaacacacacgaaaacgactgatgttatcgccgcctgccctgcgggcggcgatacagggagaacgcttaatcatgaacgaaaacagcacgctgaacgcactgatttgtcgtcacgcccgcaacctgctgctggcgcagggctggccggaagagacggatgttgaccagcgtaacccgaagtatccgggctggatcagcatttatgttctgctggatgcgccccggctggcgacgttacttatcaaccgtcacggcggcgtactgccgccgctcctggcctccgccattcagaaactgaccggaaccggggcggaactggtactgtccggcagtcagtggcagtcgctgccggtacttccggcagacggaacgcaggtgtctttcccgtatgccggagaatggctgaccgaagacgaaatcagggctgtacttgcggcggtgcgcgatgcggtacgcagtgtcagttgccgggtggcagaagatgcgcggcgtatccgggcggcgctgaccaccaccggtcagacgttgctgactcgccagacgcgccgctttcgtctggttgtgaaggaaagcgatcacccctgctggctcgatgaagatgacgaaaacctgcccgtggtgctcgatgccatcgtgaaccggggagcacgtttttcgtcggtggaaatgtacctggtcagcgattgtattgagcatatcctgtccagtgggctggcctgcgatgtgctgcgtataccggatgaaccgccccgccgctggtttgaccgtggtgttctgcgggaggtggtccgggaagcccgggccgaaatccgcagcatggcggatgccctggcaaaaatccggaaatgatgacgttggcggggtaaatccccgcctttttcctgccggtccccggacagagcacaaaggaagtcgccgccggctccgctttacccggccatgcggggcatggccttgtgggttttcagttatgtggcctcagcgtcgtgtgcgggctgtgccgtgcctccatcgtagccgggctggcagggatgcaagggtacgcttcgccgctgcggtcacccggtccctccttcccgtctgccgtgattttccggtcgttcacccgctcagatttcgcggtctcaccctccaactcccgccagccgtgtgcgtcaggctgcggcttcccttgcgccctgtgcatccccgccttatcgcccggcttttatggaggcacggcaccgcccggtgtcgcggaatatgtgaacaacggaggaaaacatcatgcaatatgcgaaacctgtcactctgaacgttgaagagtgcgaccgtctctcctttctaccgtatctgtttggcaacgattttctgtatgccgaggcgtatgtgtacgcgctggcgcaaaaaatgatgccggaatatcagggaggcttctggcacttcatccgcctgccggacggtggcggttacatgatgccggatggcgaccgtttccacatggtgaacggtgcaaactggtttgaccgtaccgtgagtgctgatgccgcaggcatcattctgacttcccttgtgattaaccgccagttgtggctgtaccacgacagcggggatgcaggactgacccagctttaccggatgcgcgatgcgcagttgtggcgtcacatcgaatttcaccccgaatgcaacgcgatttacgcggcactggactgattaacggacggggcggcaatgccgcccctgtaaaggagacgagaacatgtactgtactgttaaagaaattatccgcgaagtgctgaacacagacgtgccggacagtgaatgcgtttttgccgtggtgctgacccgtggggatgtgcgtcacatagcccaggactggagtctgacagacgatgagctggaaaccgtcatgcagcgactggacgatgcctttgcgcatggtgcggatgtcagcattgttcacgacgttgttcgtgagctgatggaagaaaagcgcgccagccgtcaggtgacagttccggcggtgatgctggaaaaagtgatggcgctggcaggcagtgaaatgaagcgcctgtatgccgtcgggagcgagaacgggggcgacggtgacgcattcgtcagggaagaacgcgaagcaatggacgttgtgttacaggcgctggacggggagcacatgtcatgaatatcagcacagaaacccgcgaaattctgcgcaattacaaagccgtgattaatgcgcggcgtcgtgaaatggggcagaaaccgctcaccactgcgcagattgttgatgaaatctgcgattttgtggcgaatcagcaggctgtattcctcggcggtcactacatccttcagggcagcataaacaggtgatacaggggcaggcggtggaggccgcctgtcagcccgcgcgaaaacccctggcaggctgacgcctgccggaagggaagcgggccacgctggcgcgtcgcccgttacccttcccgtctgtgatgtgtctgactcaggagtgtttctttcttatgttatggaactgttcctgatgttgttgttcctttatctactgctctgattctgactactgcagtgttgttctgtctgccgggtcgggtagcagcggcacattgctgcgccgccgccccctaagaacggagcgtgcgagtttccccgcactccgctcaagcctttataagtgctttcggtgagcaccggcttccctgctgtgtaactgtcggtggcagttcggatgtaacaactcgagattggtcagttcgtcactgccgcccataactttcctgatccggtgatgtatattccatccggtctggttggttatgggttgtccgcactgcggacagtgtttcccctgcctcttccagagttgaactactgtcttcatcttctttgatttgcctttccagattagatccagacgacgttcaaagtagatttccattccgggggtgtatggtgttgcttcgcctttgatttttatatggcgctttatcggtgtttccattgcccggaagagagtcagaattttcccttccggggttatggctttaaagatccagcgcctgccttcaaaggagaagtatcgtccggcgatccaccgcaatccttttcgggggtgccttcttacacaccatcgccatatagctcgccagatttgggtgtcgacataattaaatgtttctttcgccacgacgtgtcggtgataggtagcccatccccggattaccgggtttagctggcctatcagtttccatgccgggagcgtcggattgcgtttaattatttctctgactttacagaggaagttcttcaggtttttcttcgacggtttaatcagcattttaccgttgtacttcctgacgttctgccctaaaaagtcgaagcctttatctatatgtgtaatcgcggttttttcttccgacagttccagccctcgttcgcgcatgaaagctgcaatcagtggtctgacctcattttccagcaattcacgggagctgcctgaacagatgaaatcatcagcatatctcacataattcacctggtgctttgcactgtgataaccacttttcctgaacgtttgcatcagttccttctccagtccgtccagagccatgttggcgagaacaggggatatgatgcctccctgcggtgtcccgctgttcgtatggttaaacacgcctctttccatgtaacctgctttcaaccattttttaagcagtctcctgtccatcggaatatgggaaagcagccagtcatggctgatgttatcgaaacaccctttaatatcgccctccagtatccatttgggcgatactttctggctcatccgcagaaaaatggactcaatggcgtcatgcgtgctgcgcattggtctgaaaccatagctgttatggtcagcagtggtctcggatacgggttccagagccagcagccacagtgcctgcatggcccggtccctcattgtgggtatgcccagcggtcgcgttttgccgtttgattttgggatatgtattcgccgtagtggctgtggcctgtaaccacacagattcaggctgcatattccttcccatttctccttcggtgtgtgccatatttttccgtcaataccgggtgtccttttaccggtattttcagttacacgcctgacagccacggctttgccggagaatgagcgggtgaggatgcgctgtagttctctgacctgccgccattgttgctgtcgggttgcctttgcaatccgtaactgtagctttcgcacccgggcatggcatgctttccagtctatggtgtgccagcctgtcgggtggggtatcgtggacacactgatgtgtgtattcatctcgctgatatccttttgactgctttacagcttttcatgcaattaaagaccagacggaagtctgcccgctttcgcgtcggggaacctgccccgtatcccggtcattacaaccgggcatttgctttttccgtcctcctctgcccgcaccgcctacagtgttccttacggttcacctgcctgtaaggcagcgatacgggtttaccaggttccgcttaacatacagagggtcagggcgggttctgtctcttcaccgggggtctctgcgcccatgtgctccctgtgcgcgaggtagcaaccggaccccgtaccttttggttcaggcctgtcagcatctttggcctgttgccgataacggtgtttatcaacagttcacatgtgttaacccttctgaccagccttgctctcctgccacatgatgcttgcagcaaggtaaagcccctcacggggctttacccgggctgacgcccggctctcgttgtcccgggagcttcagaccccgccgttgccggcagcgcctgtcccggtaggctacagctaatgggatagctggttttatcaatgtaaaacaatacgttaagcgacttcctgtcgcacgcgcaccttcggctcccggctgcctggcggcatccggtcgtcaggcccgactccgacaggcagctgctggcgcacctgccagtctccgccgaacccgctggcgcggtttcgggctgccgctacggtccgatgcgtgaaaacccctggcttgcagcgaccgttccggtcgcgccgcctctgtcgcgccgtggcctgcgctcccggcatcccggcaaaaggccgccgggatgtaaggggcaacgccgtttcgcgcacgcgctctccgtcgttgcggcgggcccctgctcattgcctgccgggtgccacacacccgtatgagtccctgtcgccgggggcatagacagccacaacctgccgcactgactgtccagggtaaatgaacagcccacaaaattttttacccaaaaaccggtaaaaaattttgcgttctgcccaggacaggtgcgtcaggccgtggcagtgatgccccttgcggcgaaggttctcaaacgggtgaagttcataccacagggaatacagcagcaggttcccgcgaaacgtcaaaaccgcggctcccgaaactcaacgggtgatgttctttaaaaatcaggatttatttcaggctccggcaatacgcatttatttgttctgtcagtcatccggctggcaggtaatgagaacgcaggaacagaaggaggaaaacaccggagaacgtcagacgcagatatgaaaaaagcaggccggggaggacctgcttaatccacaccgcaaaaactgttcgagcagtttctgcggttccattcaacagtcataaggagtttcatttatgacggtaagtattgtttcaccttccgcagcggctgtaaagccccgccgtcatccccgtttcagacgcgaagacatccccgcgccggaaattgaccccgtgctgaaagccttcgggcgacacattgcccggagttttcaccggggacgtggtgtacacatccccgccatgaaaaatacggctttcgggcaggtgctccgcacactcgaactgaaacgcgcttttaactgatgaggtgagccgccccgcgaggggcggcaacagacggaaggagaacattttatgacattagctgcaatcaccatgaccgccccggaagccgccagccctgtgcagatgtaccgcgcgacctactcaccggatgacaacaaactgcgcctgtatgccgcgtcacgtcttgacccggagacgtataaaaaagtgcatgatgccggtttccgctgggcacccagacaggcgctgtttgtcgcgccagcctggacaccgggccgggaagacgtgctcctctcacttgccggagagattgaggatgaagacagcacgctcgctgaacgtcaggaagcacgggcggagcggtttaccggatacagcggaaagcgggccagtgaatccgcacaggcacttgatgaagtggaaagactggccgcgatgatcccgcccggtcagcccattcttgtggggcatcacagcgaacgccgcgcccgtcgtgatgcgcagcgtattgaaaacggcatgaaacgtgccgtgatgctctttgaacgtgcggaatactgggaagaacgggcgcggtcggcactgcttcacgcgaagtataaagaacgcccggacgttcgctggcgtcgtatcaaaaaaatcgaagctgatttgcgcaaggctgaaaagaccatcgcacagtcgcagaaatatctgacgatgtggcgggctgaatcgctggatctgaatatggcaaaactcatcagcagtcatgaccatatcagcgcctgtttcccgctggatacgtatccgcgcccggcagaaaaaagccagtatgaagggagccggtcgttatggtcggccctggatgatgacatcatcaccacggagcaggcccgcgaaattgcgatccgctgtcatgaacggcagattcagcatcagcaacgctgggttaaccactatcagaaccgcctgatctatgagcgtgccatgctggacgaaagcggcggcgtggttacccggacacaggattttgagccgggcggacaggttttcagccggggcgagtggctgactatcatccgcgtgaacaaaagcaacggggcggtgagttcagtcacaacgccaaattacagttttctcgggtacagcggcacgatgaaagtgacgcccgatcgcatcacggactacaaagcaccatcggcagaagaggctgccgtcgccagtcaggccgcgaagcgtccgccggtagtcaactatccgggggaaggtttccgggaaatgacaaaggcgcagtgggccgccctgccccgggactgtaaggccgtgcgcagtgtggaagaagcagaagaccacggggcataccgctaccgccgcacaatggacaataatttccgtctggtgaatgtgtatatcaccgacatgaaaatcacggaaatcccacagaaataaggtatatcccccgggaaatccccgggggatgacggagataatgatatgcacagtcagttaagagaacgtatccggctgatgcgcgcaaggctggataacgccgcgccggttgctgaaatccgggctgaatctcagctttttgtgagtcctgccccgatctgtgatcgcctggtgacgctggcggaaatcagcaaccgtgatcacattctggaaccctctgccggcaccggggccatactgcgggcgattcgggataccgcgccggaggccatgtgtgatgcggtggagattaacagcgggctggtccggtatctgcgggaaaattttaacggtgtcagggtacagtgtggcgacttcatggaatggcagccggtgcagtattacagccggatcattatgaatccgccgttcagtcacgggcaggatatccggcatatcctgcgggctttttccctgttgcgtccggggggcgttctggttgccgtctgtctcaacgggccacgccagcaggagaagctgttaccgttttctgacgtccgcgaggagctgccgcgcggcacgtttgcttataccgatgtcccgacgatgattattcgtttgcgtgcctgatgacacagggctggcgggaggataaatgcccgtctgtccgcgccgggaaaaaaccgcgcgccggtggcgctgaaaggggccgcgctcacgcgccgcccctttcattacgcggacgttctgatgggggcttctgtcttttcagacctgtcatttgtctgttactgatgatgttgttgttcctgctactgctactgctactgctactgctactgctactgctactgctactgttcttcttttttctactgccctgattattgtctgttttgttgttctcctgcttatgccttttccgggcgtccccctggcggggcgggctgtcgtgaacggagccagcgaagctgtctccgccctggcgggcttccatccctgacgcaaaaacccgggtttgcagcgaccggaacggtcgcgccacccttgtcgcgccgtggcctgcgctcccggcatcccggcaaaagacgccgggatgtaaggagcaacgccgtttcgcaaaccgcgcttcacgtcgttgcggcgggtccctgcccgttgttctgtccggtgccattcacctgtttaagcccctgtcgccgggggcatagacagccacaacctgccgcactgactgtccagggtaaatgaacagcccacaaaattttttacccaaaacccggtaaaaaattttgcgttctgcccaggacaggtgcgtcaggccgtggcagtgatgccccttgcggcgaaggttctcaaacaggtgatggtgaataccggagggaacaaaaggcaggtccccgcaaaacgtcaaaaccgcggctcccgaaactcaacagatgatgggggctgaaaacatcaacagaaggagacacatcatggcagttcgtggcattaacaaggtcattcttgtcggtcgtctgggaaaagatccggaagtccgttacatccccaacgggggcgcagtggcaaacctgcaggtggccacgtcagaaacctggcgcgacaaacagacgggggaaatgaaggagcagacggaatggcaccgcgtggtgctgttcggcaagctcgcggaagtggcaggtgaatatctgcgtaagggggcgcaggtctacattgaaggccagcttcgcacccgtagctgggaagataacggtattacccgttacgtcaccgaaatccttgttaaaaccacgggcaccatgcagatgctggggagtgcaccacagcagaacgctcaggtgcaaccgcagcctcagcagaatggtcagtcacagagtgctgacgcgacgaaaaaagggagcgcgaaaacgaaaggccgtggacgtaaggctgcgcagccggagcctcagccgcaaccaccggaggggaggattacgggttttcagacgatatcccgttctgactggcctgactgtgataaccgccccgtcctgcgcggggcatcaccggagatatgaggatgagcgaatatttcagaatacttcagggactgcctgacggtccttttacccgcaaacaggccgaagccgttgccgcacagtaccggaacgtctttatcgaggatgaccacggcgaacagtttcgcctggttgtccgtaataacggaacaatggtctggcgtacctggaattttgaggacggtgccgggtactggatgaaccatgtcatccgtgatttcgggatccttaagtaagagaggtgccggacggggatcacgtccggcagacattaactacacaataaggggatagtcatgtcagtaacaaagtctgaaccaaaatctacccgtaaagcaagccgtaaacctgcaaaaacgcaggaaactgtcctgtctgccctgctggcgcagacggaggaagtgagcgtgccgctggcctcgctgattaagtcaccactgaatgtgcgcacggtgccgtattctgcggagtccgtcagcgaactggctgattccattaagggggtcggcctgctgcagaatctggttgttcatgccctgccaggtgaccgccacggtgtcgccgcaggtggtcgccgactggcagcactcaacatgctggcagagcgtggcatcattccggctgactggcctgtccgcgtgaaaattatttcgcaggaactggcgacggccgcatcgatgaccgagaacggtcatcgtcgggatatgcacccagccgaacagattgccggattctgtgcaatggcgcaggaaggcaaaacacctgcacaaatcggtgatttgctgggctattcaccccgccacgttcagcgaatgctgaaactggctgaccttgcgcctgtcatcctcgatgcgctggcagaagacctcatcaccaccgagcactgtcaggcgctggcgctggagaacgacaccgcgcgtcaggtgcaggtgtttgaagccgcctgtcagtcgggatggggcggtaaaccggaagtacagaccattcgtcgtctggtgaccgaaagtgaagtggcggtggcagggaacagtaaattccgcttcgtgggggctgatgccttctcgccagatgaactgcgcactgacctgttcagcgacgacgagggtggctatgtggactgcgtggcgctcgatgccgccctgctggaaaaactccaggctgttgctgaacaccttcgggaagccgaaggctggggatggtgcgccggacgcatggagcctgtcggtgagtgccgtgaggatgccggaacataccgctgtctgccggagccggaagcggtgctgacggaggcggaagaagaacgtctgaacgaactgatgacgcgttacgacgcgctggaaaaccagtgtgaggaatctgacctgctggaagcagaaatgaagctgatgcgctgcatggcgaaggtcagggcgtggacgccggagatgcgtgccggaagcggtgtggtggtgtcctggcgttatggcaacgtgtgtgtccagcgtggtgtgcagttgcgcagcgaggatgatgcggctgacgacgctgaccgcacggaacaggtgcaggagaaagcgcccgtggaggaaatcagtctgccactgctgacgaaaatgtcttccgaacgcacgctggcagtccaggcagcactgatgcagcaaccggacaaatctctggcactgctggcatggacgctctgccctgatgaatcccctaatgatttttaccaaaatcattaggggattcatcagcgctctgcctgaatgtgtttggcagcggagcgtacagtaaaccagcacaaatcagcctggaatgtaaacattattcgctgaccagcgatgcgccatcggggaaggacggtgccgcattcctggcgctgatggcagaaaaagcccgtcttgcagccctgttaccggagggatggtcacgggatatgacgacattcctgtcactcagccaggaggtactgttatccctgctcagtttctgcaccgcgtgcagcatccacggcgttcagacccgcgagcatggtcacacgtcacgcagtccgctggactcgctggagagcgctatcggattccacatgcgcgactggtggcagccgacgaaagcaaacttcttcggacacctgcaaaagccgcagattatcgatgccctgaatgatgccggactgtccggtgctgcgcgggacgcggagaaaatgaagaaaggcgatgccgctgaacatgcagagttccacatgaaagacaaccgctgggtgcctggctggatgtgtacaccacgtccacaggcagagacggaaaccacggagtaccgtgacgaccaggcagaagccgcctgaccgccagtcataaaccatttatcacgccgccctgccggagacggggcggcagcaagggagataccgtgatgaaaactgaactgaccctgaatgtattacagaccatgagcgcacaggaatatgaagatatccgggctgccggaagtgatgaacgtcgtgaactcacacatgccgtgatgcgggagctggatgcgccggataactggacgatgaacggcgagtatggcagcgagttcggcggctttttccccgtccaggtccgtttcacgcctgcccacgaacgttttcacctggcgttatgttcaccgggcgatgtctctcaggtctgggtgctggttctggtgaatgccggtggtgagccgtttgcggtggttcaggtacagcggcggtttgcaccggaagccgtcagccattcactggcactggcggcgtcactggacgcgcaggggtacagcgtcagtgacatcatccatatcctgatggcggaaggaggtcaggcatgagcgcacgttcacaggcactggttcccctcagcgcagagcaacaggccgcatggcgggcggtggcggagacagaaaaacgccgccaccagggaaacacgctggcggaatatccgtatgcgggggcgtttttccgctgtctgaacggaagccgcaggatatcgctgtctgacctgcgatttttcatgccgtccctgaccgcagaagaactgcgcggcaaccgttctcagtggctgtatgccgtcgatgtgctgattgaaactcagggcgaggtctgccttcttccccttcccggcgatgcagcagagcggctgttcccgtcggtgcggttccgtgtcagggagcgcagtcgccacaaatccgcactggtcatgcaaaagtacagccgccagcaggcgagggaggcagagcagaaagcccgtgcgtaccaggcgctggtcgctcaggctgaaatcgaactggcattccattcgccggaaacagtcggaagctggcatgcacgctggagtgaccgggtggcagagcatgacctggaaaccctgttctggcagtggggtgagcgttttccgtcactggccggaatggaacgctggcagtggcaggatatgccgttctggcaggttattgcggaagccagtcttgcagcaagagaggccggtcacgctgtccgtgagatggagcggtggatggtgccgaacaaactccgggaggcggcgtgatgcggcaacaatcacacagattacccgtaaacagcctgaatgagcgggttattttcaggaaaagtgagtgtggtcagcgtgcaggtatatgggctatgatgtgcccggcgcttgaggctttctgcctcatgacgtgaaggtggtttgttaccgtgttgtgtggcagaaagaagatagccccgtagtaagttaattttcattaaccaccacgaggcatccctatgtctagtccacatcaggatagcctcttaccgcgctttgcgcaaggagaagaaggccatgaaactaccacgaagttcccttgtctggtgtgtgttgatcgtgtgtctcacactgttgatattcacttatctgacacgaaaatcgctgtgcgagattcgttacagagacggacacagggaggtggcggctttcatggcttacgaatccggtaagtagcaacctggaggcgggcgcaggcccgccttttcagggctgatgctggtctgactgcactgaagcgcctttataaaggggctgctggttcgccggtggcccctttctccttgctggcattgtacgggcatgaacaaccagactgccaggaaggccgtttccctccgggaacggggatgaacgtgcgcctgcggcgcccgttcttttcccccgccttctctgtttatgacttaccagaaatcacatcaccttccctttgattattctctttttcctcctgctctgactctgattactgctctgactctgattactgctgccctgattattgtctgttttgttgttctcctgcttatgccttttccgggcgtccccctggcggggcgggctgtcgtgaacggagccagcgaagctgtctccgccctggcgggcttccatccctgacgcaaaaacccgggtttgcagcgaccggaacggtcgcgccacccttgtcgcgccgtggcctgcgctcccggcatcccggcaaaagacgccgggatgtaaggagcaacgccgtttcgcaaaccgcgcttcacgtcgttgcggcgggtccctgcccgttgttctgtccggtgccattcacctgtttaagcccctgtcgccgggggcatagacagccacaacctgccgcactgactgtccagggtaaatgaacagcccacaaaattttttacccaaaacccggtaaaaaattttgcgttctgcccaggacaggtgcgtcaggccgtggcagtgatgccccttgcggcgaaggttctcaaacaggtgatggtgaataccggagggaacaaaaggcaggtccccgcaaaacgtcaaaaccgcggctcccgaaactcaacagatgatgggggctgaaaacatcagatacaggaggaattatgagcgcattttcttttaacaccacttatcagccaacaggcgatcagcagaaagacgcaatcgcacaaatcgggatcatgcagaatcgtgctgttcaggcaaatcttgcatatcagagctgccgggattctggtgcactctttaaggtgctccaccaggtcaataatgagctgcatgacttactggatagcctggagaatcatactcctcttgtcagaaaaaacgctgatgagttgatcgcgctgttactgcttttcactcggcaggttggtcagtcccgaactgacctgatttgatggtccttcccctcggaattgttgtctttttgttaacgataaccgaggggggatgatattaagcgaaaaaacttttattaattttatgccttcataaaggagttactgttatgcgattagcttcccgttttggtcgatataattctattcgccgtgagcgcccgttaacggatgacgaattaatgcagtttgttccatctgtcttttctggtgataaacatgaatcccggagtgagcgttatacatatatcccaaccatcaatatcatcaataagttacgtgatgaaggtttccagccattctttgcctgtcagagtcgggttcgtgatttgggacgccgcgaatacagtaaacatatgttacgtcttcgcagggaagggcatattaacgggaaagaagttcctgaaattatcctgcttaattcacatgatggttcatccagttatcagatgatcccaggaatttttcgttttgtctgcacaaatggcctggtgtgtgggaataattttggcgaaatccgcgttccacataaaggtgatattgtcgggcaggttattgagggagcgtatgaagtgctcggtgtctttgataaagtcactgaaaatatggagacaatgaaagagatacatcttaacagtgacgaacaacatttatttggcagagctgcattgatggccaggtacgaagatgaaaataaaacgccagtgacgccagaacaaataattactccccgccgttgggaggataaacagaacgatctctggacaacctggcagcgggttcaggagaatatgataaaaggtggattatcggggcgaagtgcctccggtaaaaataccagaacaagagccattacaggcattgacggtgatatccgaatcaacaaagcattatggatgattgccgaacagttcagggagtggaagtcatgataatataagtaaagccccgaaaaatttttcggggctttacttatattatcatcctgcggcattgctgtgtcgtctgatatgcctcaatttcatcaactggcttttcggtagtctgtaaatattgtgcccgcgaaaaatggtctggcaggaggctgcgcagttaccggatatatataagatgggatcccgctttgcggggcttcggccagtcagcattatcactcatatgatatttttgtgtgtggccttccatgccgctgtcgcggcataaccggtatttgacaatgtatacaatattaatttttctgcacactgttaatttgggaaagtgatttcttcgtggtcggaacccggatgcctttactgctctttatccaggtataaatccggtaaacctctgatgcgtaggcaagacgtctctggttctggcgttcggtcttcctgaatccggcattgtatgcaccaacggcctcccaggagacgccccattttttaaaggctattgccagataataagcaccggtataaatgttcatacagggatctgttgtcagatgttccggcttaattccatagcgggccagttcgttaaaatgctgggaatctacctgcatcagtccgctgccatatcccgttaccggattaataccgatggcattaacccggtaacgggattctttccatgatatcgctctcagtaaatccgggtctattttgtaatcccgacctgcaagatcaaagcaatcggcggcttcgcagatcccatttataaacatcaggcagattgctaacatccattttttcatttttccacctctggtgactttatccgtaaataatttaacccactccacaaaaaggctcaacaggttggtggttctcaccaccaaaagcaccacaccccacgcaaaaacaagtttttgctgatttgctttttgaatcattagcttatgttttaaataatgtattttaatttattttacattattaaataggggcgttgacgaccctatggcgaccctatggcgacccttgttagggtcagtactgacaaattttatgaaaaacatttggatatattagggccgcccctagcagcgccgtgcgtttttttatagtatgcccctaggggcgctgctaggggtgctcttcttttttcagaccaaactatgagtaaatgaaataaaacacttgtttcagaatataaaaggtactgtcttatggccagagtaaatctgtatatcagtaatgaggttcatgaaaaaattaacatgattgttgaaaagcgtcgtcaggagggagcaagagataaagatataagcctttcaggaactgcttcaatgcttcttgaattggggcttcgcgtatatgatgcacagatggagcgtaaagagtctgcgtttaaccagacagagtttaataaacttcttcttgaatgtgttgtaaaaacacagtcaacggtggcaaagattttaggtattgagtctctcagtcctcatgtctccggaaacccgaagtttgaatatgccagtatggttgacgatatcagagagaaagtgtctgttgagatggaccggttttttccaaaaaatgatgatgaataaatgaaaatgaagtttgagttggttcaaatataagaatttttatgattcaaaaagatgacaatacgtcagataattagtatattaattacgtggttaatgccacgttaaaaattgaaactgaaaatcgccgatgcagggaggtctgaactccctgcatcgactgtccatagaatccttaacggaggttcctatgtgtgcgctggatcgtagagaaaggccacttaacagtcaatctgtaaataagtacatccttaacgttcagaatatctacagaaattctcccgttccggtttgtgtccgtaacaaaaaccggaaaatcctttatgccaatggggcttttattgaactcttttccagagaagataaacccttatccggagagagttatatacgtctgcaggttgaaatttttctttcatcacttgaattggaatgccaggctcttggacatggctctgcattttgtcgtcgttttaattttcatggcgaaatctatcagataaggatggagaatgtttctttttataatgacgaatctgttgttttatggcaaattaatccgtttcctgattatccattttttgcgttaagtcagagtggaagtaatacaaatacttctgataaattaacgatatggaatgatctttcccccgggacattgcttgttttctctttttatatgctgggtgttggtcatgcaacaattgccagagaattgggtattacagacagagcatctgaggatcgaattaaaccagttaaacggaaaataaaagaattttttgaacactttgatttattcagagtgtcatgtatctataaagggaaaatagatttgctattaaatataattcgtgaattttatagcgttaagtaaatgttaaataaggcacgccaattttggcgtgttttttttcgtcggtttctgtgcaatcataattttattagtcgggaaacagaggtgaattgagtgaggaggcgtaacgcgagaggcggtataagcagaacagtctcggtgtatctcgatgaagatacaaataaccgacttattaaggccaaagatcgtagtggaagaagtaaaacgatagaagtccagatccgtctcagagatcatctgaaacgatttcctgatttctataacgaagaaatattcagggaggtgaccgaagagagcgagtcaacatttaaagaactttagtttttatctatcaatattaaacagaggaatcatatggacgccgttttaagtgttcagggtgcttctgcgcccgtcaaaaagaagtcgtttttttccaaattcactcgtctgaatatgcttcgcctggctcgcgctgtgatcccggctgctgttctgatgatgttcttcccgcaactggcgatggccgctagcagcagtggtcaggacctgatggcaagtggtaacaacacggttaaggcgaccttcggtaaggactccagtattgttaaatgggttgttctggctgaagttctggtcggtgcggtcatgtacatgatgaccaaaaacgtcaagttcctggccggtttcgccatcatctctgtatttattgctgtgggtatggccgtcgttggcctctgacaggaaataaaacgatgtcgggagacgagaataaacttaagaaatatcgtttcccggaaacactgaccaaccagagccgctggtttggcctgccactggatgaactgatccccgcagcaatctgtattggctggggtatcacaacatcgaaatatctgttcggtattggtgcagcggttctggtttatttcgggattaaaaaactgaaaaaagggcggggcagttcctggttacgtgacctgatttactggtatatgccaacagccctgctgcgcggtatttttcataatgttcccgattcgtgtttccggcagtggattaaatagaactgataccaggattgttatatggaacacggtgcccgtttaagtaccagtcgtgtaatggccatcgcctttatatttatgtcagtgcttattgttctcagcctctctgttaacgtcattcagggggtgaataactaccgtcttcagaatgagcaacgcactgccgtgacgccaatggcatttaatgccccctttgccgtgtcacagaacagtgccgacgcctcttatttacagcagatggcgctgtcatttattgccctccgtctgaatgtttcatcagaaaccgtcgacgcctcacatcaggcgcttctgcaatatatccgcccgggcgcacagaaccagatgaaagttattctggctgaagaagcgaagcgtattaaaaccgataacgtgaactcagcctttttccagaccagtgttcgtgtctggcctcagtatggccgtgtggaaattcgtggtgtgcttaaaacctggattggtgattcaaaacctttcactgatatcaaacattacatccttattctgaagcgggaaaacggggtgacctggctggataatttcggggaaacagacgatgagaaaaaataatacggcaataatattcggcagcctgtttttttcctgcagcgtgatggccgcaaacggtacgctggcccccaccgtggtgccaatggtgaacggtggtcaggccagtattgccatcagcaataccagcccgaatctgtttaccgttcccggtgaccggattatcgccgtgaacagtctggatggtgccctgaccaataatgagcagaccgcctccggcggtgtggtggtggccaccgtcaacaaaaagccctttacgttcattctggaaacagaacgtggtctgaatctttccattcaggccgttccccgtgaaggcgcggggcgtaccattcagctggtcagtgacctgcgcggaaccggagaagaagccggtgcgtgggaaacgtccacgccttacgaatccctgcttgtgaccatcagccaggccgtccgtggcggaaaattacccgcaggctggtatcaggtcccggtgacaaaggaaaccctgcaggccccggcggggctgtcttcagtggcagatgccgtatggacggggaatcacctgaagatggtccgctttgccgtggaaaataaaacgctgtctgccctgaatatccgggaaagtgatttctggcagccgggaacccgtgccgtgatgttcagccagcctgccagccagttactggcaggtgcgcgcatggatgtgtatgtcatccgtgacggggagggcaactgatggccagtatcaataccattgtgaaacgcaagcagtacctgtggctggggattgtggttgtcggtgcagcctccgcgattggtggtgcactgtatctgtctgatgtggacatgtccggtaacggtgaggccgtggctgaacaggaacccgtgccggatatgaccggtgtggtggatacgacctttgatgacaaggtgcgtcagcaggcactgttgcaaatagtcggtggtgataaacttatcatccccttttgctgatggagctgcacatgaacccattcaaaggccggcattttcagcgtgacatcattctgtgggccgtacgctggtactgcaaatacggcatcagttaccgtgagctgcaggagatgctggctgaacgcggagtgaatgtcgatcactccacgatttaccgctgggttcagcgttatgcgcctgaaatggaaaaacggctgcgctggtactggcgtaacccttccgatctttgcccgtggcacatggatgaaacctacgtgaaggtcaatggccgctgggcgtatctgtaccgggccgtcgacagccggggccgcactgtcgatttttatctctcctcccgtcgtaacagcaaagctgcataccggtttctgggtaaaatcctcaacaacgtgaagaagtggcagatcccgcgattcatcaacacggataaagcgcccgcctatggtcgcgcgcttgctctgctcaaacgcgaaggccggtgcccgtctgacgttgaacaccgacagattaagtaccggaacaacgtgattgaatgcgatcatggcaaactgaaacggataatcggcgccacgctgggatttaaatccatgaagacggcttacgccaccatcaaaggtattgaggtgatgcgtgcactacgcaaaggccaggcctcagcattttattatggtgatcccctgggcgaaatgcgcctggtaagcagagtttttgaaatgtaaggcctttgaataagacaaaaggctgcctcatcgctaactttgcaacagtgcccgagcccctgcaggcaggagagcgcggtcagatagtggctgtgcaagtggacgatcgccttgcaggccgggttgtgcaaatagaccgcccggtgaaaagtgacctctttcgacggtttgtcgccggagatccattccccttgcagcgtcaccaccgacaaccgctgagcctgcagttcgccgaggcaggcgccggtcggcgtcgccagcaggttgccgtccggcagcagcagcgacagattgccagcggagccggtggcatagccgcggctaaacaacgaggcgccaatctgcaccatttcctctcgcagttgttgctcagtcatgacgaaactcctgctgggcacgggcaaagaactggatatcgccgaagttacctgacttcagcgccagggagagcggctggcgggtgtcacgcacccagggcacgccaggggagatggtcggcccaatatggaacgcctcaacccccagggtctgcgccacaatgctcgacgtttcccctccggccacaataaagcgggtaaatccgttcgccttcagggcggcggcaagagcggcaaacagctgttccacccgttcgctgctggccttgtcgccatactgcgcctggatccgctgcagcgtttgcggctcggtggtggcatagatcatcggcgccagcggcgcatcgcgctgcgcgtccacccagtcagtcagcgtcctgacgtagctctccagatcggtaaagcaggcgcttaagtcgacggcgcgggcgggggcctgttgacgataggccgccacctggctgttggtcatcaccgagcaggagcccgagagcaccaccgccggaccggccagcggcatgccggcctgagcgctttcccccctggcgccatggcgctgcgcccagtcgcgggcgaggccgatggcgaggccggaaccgccggagaccagcttcatctcccgcagcgccacgccctgggtgagcagatcctgttcgctgagggcgtcgagcaccacatagcgcaccgccggatcgttgactgccgccagcgcggcggcgaccgggcgacaatcggccaggcaatcagcgcggcttttccgcgcccttggcgctcaattaagcggcccaggtgcgcatcctccatcggcgtcaccggatggtggcgcatcccggactcattcagcagttgctcgccgacgaacagatatccctgatagaccgtgcggccgttaaccggcagcgccggggaaatcaccgtccgcgtctcacccagctcggccagcagggcatccagcaccgggccaatgttgccctgcgcggtgctgtcgaaagtggaacagtacttgaaataaaactgctgacagccctgggcctgcagccagcgcagggccgccagcgactggctgacggccatttccgccgggcaggagcgggttttcaggctgatgaccaccgcctcgctggtcagcggaatatcgcgggtcggcacgccattcagttgcaccgtcggcatgccgttgcgcacgaggaagctggcaatatccgtggcgccggtgaagtcatcggcaatgacaccaagctgcatgttgtctctcctcactgtttatggcccggcagggtgatgccgttgaaaatcttgatcaccgcgctgtcatcttcccgaccgaatccggcattactggcggaggtgaacatattcagcgcggtggtagcgagcggcagcgggaaggtcagcgcccgggcagtgtcattcaccagcccgagatctttgacaaaaatatcgacagcggattttggcgagtaatcgccatccaggacgtgctgcatgcgattctcaaacatccaggaattacccgccgcgtgggtgaccacgtcatacatcgtctccagtgggatcccggcgcgggcggcaagcgccatcgcttcggcggcaacggcgatgtgcaccccggccagcagctgatggataatttttaccgtcgagccaagaccaatgtcgctcccgatgcggtagactttgccggccacggcgtccagcaccggcgcgagtcgggcaaaggcggcatcgctcccggaggccatcaccgtcatgtcgccggcggccgctttcacggcgccgcccgataccggcgcgtcgagcatcaatagctggtactccgccagcgcctcggcaatggcctgagcatcggcggaggcgatggtggacgacaccatcacgacggtgcccggcttcagatgggcggcgaggccgctctcgccgaacaggatcccccgcacctgggcggcattgaccaccagcagcacaactgcatccagttccgcggcgaacggcaccgcgctggggcccgcgcctttggcgcccgccgccagcagtgcgcgacagttgtcgggattgatgtcaacgccccaggtgttcaggcccgcctgcaggcaggcgcgggcggcgcccatgcccattgaacccagtccaatcacgcagacgttagtgtgtgcagccatgctggtctccttgtgaacattagttaattaatgtgatttaatgatagaataaagcgttatcatgtgaatttatgtgagagttatcacgaataacccacatgaatataaaaaattcacaggcggaaagaggctgcacagcggcgattcttgccctaaaatagcgtaaaaaacagcggcaaagcgcgataacaacaccgggtgtcgccagggccgtagcctgggtggtgacgcctggtgtgaaaaaatggtaaggggagagcggtgattccaatagaacgacatcagcgtattttagccctggtggagcagcgtggggcggtaagcattaacgagctgacggagatcctcggcgtgtcccatatgaccatccgtcgggacgtcagtaaactggaggagcaggggctgctggtcagcgtctcgggcggcgtacgcgccgtcagccggctggccgcggaacccagtcatctggtgaaaagcacgctgcagagtgaggagaaacaggcgatcggcgcgctggcggcgagtcatatcgctaaaaacagttgcatctatctggatgccgggactaccaccctggcgctggcgcgggcgatcctcgaccggaacgatctccaggtggtcaccaatgattttgagataacccagctgctgatcgatgccagccagtgcggcgtgatccacaccggcggcactctgtgccgggagaaccgctcctgcgtgggcgaatcggcggcgcgtacgttacgccacctggctatcgatacggcctttatctccgccagcggctgggacagtcgcgggatattcacccctgatgagaacaaggttaccgtcaaggagaccgtcagccaggtcagcgcgagaagcatcctgctgtgcgacagttcgaaatacaatcaggtggccacgtttatggcgttacctttgacccggttcaccaccatcattaccgaccggcatctttccgatgccgccgccagtcatatcgcccggcacgcctgcgaggtgctgcgggccggataacgcgcgcggccaccgccggcttagcgttgccagtgctcgatcagcgccgcgccgatcccggcgatttgctgatttcgctcggccatgctcgccggcgtatcccgcagataaatcaccacaatgcgctctgctttgttattcgggccaagcagggcgacaatcccgcgcgcaccccgcttgctagctccggtcttatcggcgataaaccagcccgccggcagcacggagcggatcaacggtccggcgacccgatcgtccaccatccactgcagcagctgccgttgcgaacgggcgctcagacgctggctggtcagcagcttgcgcagggtcgcggccatgctggccggggtagtggtgtcgcgggcgtcgccgggaagcgcctcattcagttccgtttcccagcggtcaaggcgggtgacgttgtcgccgatctggcgcaaaaaggcagtcaatcctgcggggccgccgacggtggccagcagcagattggcggcgctgttatcgctcatggtaatggcggcggcgcagagttcgccgaccgtcatgccgtcggcaaggtgtttttcgctgaccggcgagtagtccaccagatcctgctggcgatagtggatctttcgctccagctgttcgtcaccggcatccacccgcgccagcactgcgccgcagagcactactttaaaggtgctcatcatgggaaagcgttcatcggcgcgccaggcggtcagcgtgcggccgctggccagatccatttctatcatgcctacgcggcccgacagctggctttcgctttgtttaatttgctcaagcggctgcgggctggcgtgtaccgccagcggcagggtggctaacagggagataatacacaggcgaatataacgcataaccacaatacatccttgagtgaaggccgataaaggcgagtaaagaagcgacaaataagaataacccggcgttggcactgttgcaaatagtcggtggtgataaacttatcatccccttttgctgatggagctgcacatgaacccattcaaaggccggcattttcagcgtgacatcattctgtgggccgtacgctggtactgcaaataggggagcccgcagaattcggaaaaaatcgtacgctaaggttttccgggcatccgtaagggccgaaacttcccgtcttccagtctgcggctctgccgccagacgtaatcgccggttaggttgatgtgctcccagcccagcggcgacaggaattgcagcagctcgccgtccaccggcttgccggcctcgaccaacccctgggtggcgcgttccaggtacaccgtgttccacagcacgatagccgccgtcaccaggttgaggccgctggcccggtagcgctgctgctcgaagctccgatccctgatttccccaaggcggttgaagaacaccgccctggccagcgagttgcgcgcctcacctttgttcaggccggcatgcacgcggcggcgcagttcaacactttgcagccagtccaggatgaacagcgtgcgctcgatccggcccagctcgcgcagggccacggccagtccgttctggcgcgggtagctgccgagcttgcgcagcatcagcgaggcggtgacggtgccctgcttgatcgagctggccaggcgcaggatgtcgtcccagtgggcacgcacgtgcttgatgttcagggtgccgccgatcagcgggcgcaacgtcgggtaggcttgcacgccctgcggcacgtacagcttggtttcgccgaggtcgcggatgcgcggcgcgaagcggaagcctagcaggtgcatcagggcaaagacgtgatcggtgaagccggccgtgtcggtgtagtgctcctcgatccgcaggtcggactcgtggtacagcaggccgtcgagcacataggtggaatcgcggacgccgacattcaccacgcgggtgctgaacggcgcgtactggtcggagatatgggtatagaacagccgtcccggctcgctaccgtacttcgggttgacgtgcccggtgctctcgccccggccacccgcgcggaagcgctggccatcggaggatgaggtcgtgccgtcgccccagtgggcggcaaaggcgtggcgatactggtggttgaccagctcggccaaggccgccgaataggtttcgtcgcggatgtgccaggcttgcagccaggacagcttggcgtaggtcaggccggggctcgactcggccatcttggtcagcccgaggttgatcgcatcaccgaggattgcggacagcagcaacgtcctgtctttggcctcggccccgtccttcaagtgggtgaagtggcggctgaagcccgtccagtcgtccacgtccatcagcagttcggtgatcttgatgcgcggcagtaactggctggtttggtcgatcagcgcctgcgcccgatccggcaccgccgcatccagcggggtgattttcagccctgactcggtgaggatggcatcgggcagctcgttgtccttggccaggcgggtgacggtggccaactgctcgtccagcagctgcaaacgctcttccaggtactggtcgctgttcgggttgatcgccaggggcagggcctgctcgcgcttgagtgcggcgaacttctcggccggcagcaggtagtcgtcgaagtcgcggaactgccgcgagcccttgacccagatgtcgccggagcgcagggcgttcttcagctcggacagggcgcagatttcgtagaatttccggtcgaggccttccggggtgatcaccagcggcttccagcgcggcttgatgaaggccgtgggtgcatcggccggcaccttgcgcaggttgtcggcgttcatctcacgcagggtctgcacggctgccagcacgccttgcgcggccggcgcggcgcgcagttccagcacctccagcaaggccggcgtgtaacggcgcagggtggcgaagttctcgccgaccaggtgcaggtggtcgaagccttccggccgggccagcagctcggcctcgctgacgctctcggtgaactcgtcccaggggcactgttgcaaatagtcggtggtgataaacttatcatccccttttgctgatggagctgcacatgaacccattcaaaggccggcattttcagcgtgacatcattctgtgggccgtacgctggtactgcaaatacggcatcagttaccgtgagctgcaggagatgctggctgaacgcggagtgaatgtcgatcactccacgatttaccgctgggttcagcgttatgcgcctgaaatggaaaaacggctgcgctggtactggcgtaacccttccgatctttgcccgtggcacatggatgaaacctacgtgaaggtcaatggccgctgggcgtatctgtaccgggccgtcgacagccggggccgcactgtcgatttttatctctcctcccgtcgtaacagcaaagctgcataccggtttctgggtaaaatcctcaacaacgtgaagaagtggcagatcccgcgattcatcaacacggataaagcgcccgcctatggtcgcgcgcttgctctgctcaaacgcgaaggccggtgcccgtctgacgttgaacaccgacagattaagtaccggaacaacgtgattgaatgcgatcatggcaaactgaaacggataatcggcgccacgctgggatttaaatccatgaagacggcttacgccaccatcaaaggtattgaggtgatgcgtgcactacgcaaaggccaggcctcagcattttattatggtgatcccctgggcgaaatgcgcctggtaagcagagtttttgaaatgtaaggcctttgaataagacaaaaggctgcctcatcgctaactttgcaacagtgccctcagaggtggaatcaacgaaggcgagcgaatgaggcatcttttctggcgtcttaactttctccttctctccggggcaacaaacagcgcccagatgtaccatgaggccgccgctctttcctccgagctggatactcgttggtcttaccgctccaaagagcttatgacgctctacagcaaggcgaaatcctatgaggctggggaacgtgtcgagttcggcggaaagtcgtttgcaccgctatacacgcccaaaaacgacacgctgatcaacctattccagatctcacagcaagaacaagagcaactgaagacgattatcagcactgacgaggctcagaagcgccgcagagagcgcgatagactgcgtgatgaagaacgtcgccgcgccgctggccagcttgagcgtgaagcctatgaagccaactcattgagcaggcaaaagccctgggaagctatgggcatgagccgggctaaatggtatcgcctgggcaagccttcacctcaacaaaacagtgagacaagtccctcccctattactaatggcgaagcctcagcggttgcccttcaggcggccaggtgtaaagccgtttagatggctatttcaaagtgagtgagatttcgtaacggatggcagccctagaggctgctttcttttgaggggttagcaggcgtatagccatgctggatctcagtctatcactacctgcttaatattccacctttagatccggcagcagttcgaccaggtggccaacttaccaggcaccggcagcagctcgaccgggtggccaagttcagatctggacgccagaaggaaatcaaccaggtggccaacttaccaggcaccggcagcagctcgaccaggtggccaagttcagatctggacgccagaaggaaatcaaccaggtggccaactcaccaggcatcggcagcagctcgaccaggtggcccatttcgtacgtacgaaatcaggcgacgctatgcgaaatcttggcggcaatcccccgcgactacgtgatttttttaacgtagagcgcgctttttcttgccatagtaggccattttggcctataatcttaattaagaagaccgggcacccgccacggtcaataccggagaactccgatgatccacacagctaaccgcacctttcaccaactctatcgagaatggatacgcgaacgccgcgagcatatgcacaacgttttgacctgggagcgtgatcgttacggtgctcgcctcgtcggtctgttttatcgttactgcaaggtggccaacccctttccccgttgcactctgaatactcggatcaactaccgcgcccatgcggtgaatctgccagattggccagcccgcagcctggagctgaataaaatgtggctcagttggagagaaaaaaagtaggccgatttggcctattttttattgtacccgcttgacacaataggccaaaatggcctattatatatctcagaaggccgggcacccgccacggtcaataccggagaactccgatgatgcaaacagaacttaatcccctgatctgctccctggtcgccacccctcgccgtatggctgcaatgccccgctatgtaggccgtttctatgtggttttcgagtcgatgctttaccagcaaatgaaagggctctgccgcgagtatcgcggggcttattggcttatgtgggagctgtcgaacggcggcttttatatggctcctgggcgtcgtgatgaaatgctgaacatcgaggccatgaactactttagtggccaaatgagcgccgatgctgccgggattaccgcttgcctctacctctatagccatctgtcatttcacacagaaggcgctgaccaggagcggttttcaaggctgtatcacagcttgcgggattgggcttgtgagcatgacgaaaaagaggccatcttggccgcaatagactagcaacagaaagccccggtgatggccggggctcttaaaggaggtgcataggtagaaaaagaaatggtgcccctggtatggctgcaaccaatcacaggggctttcaccggtcaatttgaggataaacgcgatgaatacggatattgtatcacttgcaaaacacattggcgacgctctgacggcccgccgccccgttcatatgccgcgcatgaagatgcgggagcttggcttgctcttgattgaactgaaggcgtatcgggaggccgccgcgaccgttacccattgataaaaaagccccggcattgaccggggctatttgaggatttatcgcatgattagacctgaaacgcttaggccgttcgctgaagattggcaggctccaaccgccgatgaaatcaaagaggtgttggagctgattaggcaacgaaaagggcttagtaagcctctcagtggcgttgatgtcgctgatctcgttggtttgcctggtgagagaggcagcggaaagggaacccgaaccttcaggcgttgggtgagcaaaaccaaccctagccctattgcttatggtgcctggtctatcttggcccacctggcaggtttcggggctatatgggacgctgaccgggattgaaaccatgaccgaacataaggccgaacgtgctccctggggagacttcccggcagtagtgaggaacggcgatctaaaggatctctctaaagaacctgaatacgaagccgccaaacatggcgaccacaaggcgatgagctataagcgcatgaagccggccgaggacgaattgcattgcgagatcaaggcgctgcttgatcgcgccaaggctaccgacgaccaggagcgtaacgagccggagctggacattcctgccgagatttctcgccgcgagaagcgcctggaggcgatccaggcggcaaaggcgcgcctggaagcgcgccagcgtgaagcggaccaggcccgggggcgcagcgaagacgatggccgccggcctcgccatccggatggctcggacaagggcggtggctcgtacaaacgcgagtttggtgtgccggatgaccgtgatcaggaaagcttcaccgatccggacagccggatcatgaaacacgccggtggtggctccgagcagagctacaacgggtacacagcggtcgatgccgagcaccagatcatcgtggcggcggagttgaccaactgcgccgcggacagtcaggcgctgctgggcatgctggcagcagttcaggccaacaccggagaaatgccggcccagacgctggcggatgcgggattccgtagtgaggctgttctggcaaaggtcgccgatcaccacggcgatgtcatcgttgccctcggccgcgagggacgtgaagatgccaaggtcaatgccaagacccatccgcatacggcggcgattgcggcgaaattgaaaacggagcaaggcgatgcagcttaccgccggcgcaagtcgatcgtggaggctccgaatggttggatcaaggcggtgatgggattgcgtcagttcagcatgaggggcctggacaaggtgcaagccgagtggaagctcgtctgcatggcgctaaatctgaggcgaatggcgtatctgtgagggcgaaggttaaatggggcggctcaaatgcaccccagtcgtcataacacgccgcgcgccgcaagattggtatccttggcgccgacgccttgccaattgcagagagcgccgccgccatcgtcagtgctctacagaaaaccggtcacacggctctgccgcgcagactcctagcctaaatgtgacagtggttggtaatccatgccgcccgcaagggcggcggtggtgggccaatagatgattttcagagccttactgcccgttgacgcccaatccctcgagcgcgagtctagccgcagcggcgatgacggcctcgctgtgcttgtcatccttgttaggcgcccgggtgtagacggccaacacaataggtgcgcgcccagtgggccagacgacggcatagtcatttgccgtgccatacactccgcaggttccggttttgtctccgactgcccagtctgccggcaccgccgcgcggatgcggtggttgccggtcgtgtttccctttagccaatcaacaaactgctgccgctgcggcgcagccagtgcagagcccagtgtcagtttttgtaagctttccgtcacggcgcgcggcgatgaggtatcgcgcgcatcgcctgggatggcggagttcagctccagctcccagcggtccagacggaacgtggtatcgccgatagagcgcatgaaggccgtcagcccggccgggccgcccaactccttcagcaacaaattggcggcggcgttatcactgtattgcacggcggccgcggacagctccgccaccgtcatgcctgttgtcagatatttttccgagatgggtgaccacggaaccagcgcatttttgccgtaacggatgggtgtgtccagcaagccggcctgctgctggctgcgagccagcacagcggcagcaagaaagcccttgaatgagctgcacagtgggaagcgctcctcagcgcggtaacttacagttgcgcctgagccggtatccatcgcgtacacaccgatggagccgccaaagtcctgttcgagtttagcgaatggttccgcgacgaggttggtcagcgcggtggcagaaaagccagccagcggccatgagagacaagacagcagaactagacggcgatacagtgacatcaacgatattccttgtttgaaggtggagctaggtgtagcggccggatgtaatcaggccgctacagctgggattaggggtctgacgctcagtggaacgaaaactcacgttaagaagtcatttttcaatattattgaagcatttatcagggttattgtctcatgagcggatacatatttgaatgtatttagaaaaataaacaaataggggttccgcgcacatttccccgaaaagtgccacctgacgtctaagaaaccattattatcatgacattaacctatatgtcaagacccggctggttatacacgcgtttcctgaacaattcagggcgtttttcatgccattccttgagcgcctgaacgggtgttttgtgttggagcgcgcgttgcggaatgctgtggttgtagatcttgacgtaattgcgcagcgtcgattccagttcggcagctgaaccaaaacgggtctggttgacgatgtcgctgatacgaccgttgaagcgctccaccatgccgttggtctgcggatgacgaggcgggatgagccggtgctcgatgccgagctgcttgcacaggcggtcgaacacgtgtgtgccgctgggttccttcttcttgccgccagccgtgaagcggtcggtgaactggctgccgttgtcggtcagaagcttgacgatcttgacgggacaggcttgctggactttgttgaggaagtcgccactgctgccatcggtctggtcggcatagagctcgatgaagacccagcgcgtagcacggtcgatggcaacgaagagatagcgccttgccgtctcgtcgggcatctgcggcaggtacttgatgtcgatgtgcacaaagcccggctcgtagtccttgaaggtctttttcgtggcgggcgcagtgccttcctgctcgaccaggttacgtagatccgagacaccgtggcggcgcaggcaacgtcccaggccggcacgcgagacggctggattgatgaactcgcgcgtgaccgccagcaggtcgtccgtgggcagcagcaacgtcttgcgcagctccaccacgatgagctcctgctcgggcgtgagcgtcgtgtacatcttgttcggcgcatgcgacttgtcttcaggagactcgcggttttgccactttcggatggtttggcgggtgacgttgtacatcctggccagttcggcctgcgggagcgtcgagttcctgatttcctcacggatcaggtgggtagtacgggcttggctgtgcagtgcctgggtcatcgagttgccagtgaagagtcggattggaacagtgtacgcaaaacgtgtctggccttgaagagcggccagctacgcatgggtacatgatcccacgagtccagacacctataaaaataggcgtatcacgaggccctttcgtcttcaagaattttataaaccgtggagcgggcaatactgagctgatgagcaatttccgttgcaccagtgcccttctgatgaagcgtcagcacgacgttcctgtccacggtacgcctgcggccaaatttgattcctttcagctttgcttcctgtcggccctcattcgtgcgctctaggatcctccggcgttcagcttgtgccacagccgacaggatggtgaccaccatttgccccatatcaccgtcggtactgatcccgtcgtcaataaaccgaaccgcgacaccctgagcatcaaactcttttatcagttggatcatgtcggcggtgtcgcggccaagacggtcgagcttcttcaccagaatgacatcaccttcctccaccttcatcctcagcaaatccagcccttcccgatctgttgaactgccggatgccttgtcggtaaagaggcactgttgcaaagttagcgatgaggcagccttttgtcttattcaaaggccttacatttcaaaaactctgcttaccaggcgcatttcgcccaggggatcaccataataaaatgctgaggcctggcctttgcgtagtgcacgcatcacctcaatacctttgatggtggcgtaagccgtcttcatggatttaaatcccagcgtggcgccgattatccgtttcagtttgccatgatcgcattcaatcacgttgttccggtacttaatctgtcggtgttcaacgtcagacgggcaccggccttcgcgtttgagcagagcaagcgcgcgaccataggcgggcgctttatccgtgttgatgaatcgcgggatctgccacttcttcacgttgttgaggattttacccagaaaccggtatgcagctttgctgttacgacgggaggagagataaaaatcgacagtgcggccccggctgtcgacggcccggtacagatacgcccagcggccattgaccttcacgtaggtttcatccatgtgccacgggcaaagatcggaagggttacgccagtaccagcgcagccgtttttccatttcaggcgcataacgctgaacccagcggtaaatcgtggagtgatcgacattcactccgcgttcagccagcatctcctgcagctcacggtaactgatgccgtatttgcagtaccagcgtacggcccacagaatgatgtcacgctgaaaatgccggcctttgaatgggttcatgtgcagctccatcagcaaaaggggatgataagtttatcaccaccgactatttgcaacagtgccgtataacccaccatcaggctgtcagcggtatcgcgacattatatacagctgccacagaaggacggagagaagaggctttagaatatctgagagagggaagaaagttgctaaggcagtaattgatgatgagtaaagatggtttaggaaggggaccgaaccaccccggaacggtcccctgaaggaatggcaattccgttcaccgccaatattagcttttcccgggctgtgataacatctccgggtcatttttcagagcccaggactgatgaagaagaaaccaggtacacccacaccccatgacgcgacatttcgccagttcctggcgaatcccgatgtcgcccgtgacttcatgatgttacatctcccggctgaattacgcgcgctgtgcgatttgaccacgctgaagctggagtccggtaccttcgttgaggacgacttacgtcagtacgtcagcgacattctctggagcatgaaaaccaccaccggcgatgacgggtacatccatctgcttctggaacaccagagttcggcggataaaaatatggcctttcgtcagctcagatatgctgtcgccgccatgcaacgtcatcttgaagcgggtcataaaaaactgccgctggtcatcccggttctgttttaccacggcagccggagtccgtacccgttctccacgaactggctggattgtttcagtaacccggaacaggccggaaaagtatacacgacaggattcccgctggttgatgtcaccgtcatcgatgatgatgagataatgaaccacagacggatggccgcactgaccctgctgatgaaacatatccgccagcgggacatgatggaactgctggacaggctaccccgggtaatggtggaatggatttcccccgaacaggtgcgcgttctgataaactacatggtaaatgcaggtgaagcgcctgcacctgaatttatgcgggcgctggcagagcgtctgccgcaacacgaggatgaactgatgaccatcgcacaacagcttgaacagattggcatcgagaagggcctgcagcagggtctgcagcagggcctgcagttaggtgaacaacgcggtattgaaaaaggcgagcgcgaagccacccttaaaattgcacgaaccatgctgcagaacggaattgaccgcaataccgtcatgaaaatgaccggtctgactgaagacgaactagcgcagatccgccactaatccccctttcctggcactccctgtccggccatcagagaatactggtggggcagggaggcaccagactcaggctctgcctgccagccacagcgattaaacaccttcatcacccccactacgttacccgtcagacgtgctgtaagcggatttatctgtcggccgctgtcgtcaaaagcgacatcgaggttggcccgtgagagataaatgccgttcacgcccgcactgagcgccacagcatttcggcctgaccattcccgatcgctcagcagacggtagttccagtgcatatctttcgctgtttccagagcatacgtcagccggaacaggtcgttctgctcggacaactcgccggtgcaggaacgccagaggtaattcagcttgctggccagcttcgcgctgacgcccagctggcgcctctgtttcaacagccactcgatgtccggatttatctcccgggggaaacgccgttgcttcagcgcagtcgccagccagcggatgagaaagagattttcctgtgccggcgagagaacgccaccctcctgcctggccagcgcaagcgccaccagggcacaccatgccagatggcccgatttttctgtcagcgtcacggcttctcccgcaagtcagaaaaatgatgtaattcatccagcataatcagcacacgtcggcccgtcttacggggaaacattcgccgcatctcacgcgtcagctgcttcttctcccatccgtaagggaaaataatgttgtattcatttctctcagcgtaaatatcagggcccgcgacgatacgcgctacctccttattcagacgttcgcctcgccagccataagccgccagtcgcttacggatacgtgcaatgggaaaacgtttatcggagtgacgggggaagagtaacgtcccgtcctcatttcgtttgacgccaaacatatccagagactgctcgatcaccactgttctcgtgggaaaatgctcacgcatagttttcatcatattttccattccagactcctgaattaatacctgcagctgtctgaccagccagagagcagcgttatctccctgcgccatcattcatttcacactggatctcacgccagtatccggcaatattgtttaccacccgagccgtcataactgcgtcagtgacggcggagtgtgcctccccggcccagctcagcccagcctgactgacagcgccggaaagcgatatggtaccgtagcgattggtggggccgtaataccccgctgcaagtcgcatggcgcagtacaccgtcagagagtccagccagctggcacggtcgttatgcgctgccgctgtctgcttcagaatgcgcgtatcaaactcagcattgaaaataaccagcgggcgccggccgatatggtgctgcagctgctgcgcaatatcgggccacgatggcgcactgaccagatcatcgtcactgatggaaggtgcgaacaagttcctgatatgagatcatcatattcatccggagcgcatcccagagggacatcatgagccatcaactcaccttcgccgatagtgaattcagcactaagcgccgtcagacccgaaaagagattttcctctcccgcatggagcagattctgccatggcagaatatgaccgctgtcatcgagccgttttatcccaaggcgggcaatggccgacggccctatccgctggagaccatgctgcgtattcactgcatgcagcattggtacaacctgagcgacggtgccatggaag
